(19) United States
(12) Patent Application Publication
(10) Pub. No.: US 2012/0196334 A1
(43) Pub. Date: Aug. 2, 2012

(54) LIGF-TYPE ENZYMES FOR BIOCONVERSION OF LIGNIN-DERIVED COMPOUNDS

(76) Inventors: Ranjini Chatterjee, Belmont, CA (US); Kenneth Zahn, Visalia, CA (US); Kenneth Mitchell, San Jose, CA (US); Yaoquan Liu, Castro Valley, CA (US)

(21) Appl. No.: 13/220,629

(22) Filed: Aug. 29, 2011

Related U.S. Application Data
(60) Provisional application No. 61/403,440, filed on Sep. 16, 2010.
(60) Provisional application No. 61/455,709, filed on Oct. 25, 2010.

(51) Int. Cl. C12N 9/10; C12P 7/42; C12P 13/00; C12P 7/22; C12P 7/24

(52) U.S. Cl. 435/128; 435/193; 435/156; 435/147; 435/146

(57) ABSTRACT

The teachings provided herein are generally directed to a method of converting lignin-derived compounds to valuable aromatic chemicals using an enzymatic, bioconversion process. The teachings provide a selection of (i) host cells that are tolerant to the toxic compounds present in lignin fractions; (ii) polypeptides that can be used as enzymes in the bioconversion of the lignin fractions to the aromatic chemical products; (iii) polynucleotides that can be used to transform the host cells to express the selection of polypeptides as enzymes in the bioconversion of the lignin fractions; and (iv) the transformants that express the enzymes.

### CROSS-REFERENCE TO RELATED APPLICATIONS

[0001] This application claims the benefit of U.S. Provisional Application Nos. 61/403,440, filed Sep. 15, 2010; and 61/455,709, filed Oct. 25, 2010; each application of which is hereby incorporated herein by reference in it's entirety,

### SEQUENCE LISTING

[0002] The instant application is filed with an ASCII compliant text file of a Sequence Listing. The name of the attached file is ALIGP004US01_SEQLIST_AS-FILED.txt, and the file was created Aug. 29, 2011, is 813 KB in size, and is hereby incorporated herein by reference in its entirety. Because the ASCII compliant text file serves as both the paper copy required by §1.821(c) and the CRF required by §1.821(e), the statement indicating that the paper copy and CRF copy of the sequence listing are identical is no longer necessary under 37 C.F.R. §1.821(f), as per Federal Register/Vol. 74, No. 206/Tuesday, Oct. 27, 2009, Section I.

### BACKGROUND OF THE INVENTION

[0003] 1. Field of the Invention

[0004] The teachings provided herein are generally directed to a method of converting lignin-derived compounds to valuable aromatic chemicals using an enzymatic, bioconversion process.

[0005] 2. Description of the Related Art

[0006] Currently, there is a worldwide, global dependence on petroleum as a deplete-able feedstock for the manufacture of fuels and chemicals. The problems of using petroleum are so well-known and documented that they've become nearly a cliché to the world population. In short, petroleum-based processes are dirty and hazardous. Environmental effects associated with the use of petroleum are known to include, for example, air pollution, global warming, damage from extraction, oil spills, tarballs, and health hazards to humans, domestic animals, and wildlife.

[0007] Oil refineries, for example, are petroleum-based processes that primarily produce gasoline. However, they are also used extensively to produce valuable and less well-known chemical products used in the manufacture of pharmaceuticals, agrochemicals, food ingredients, and plastics. A clean, green alternative to this market area would be appreciated worldwide.

[0008] Bioprocesses can present a clean, green alternative to the petroleum-based processes, a bioprocess being one that uses organisms, cells, organelles, or enzymes to carry out a commercial process. Biorefineries, for example, can produce, for example, chemicals, heat and power, as well as food, feed, fuel and industrial chemical products. Examples of biorefineries can include wet and dry corn mills, pulp and paper mills, and the biofuels industry. In leather tanning, hides are softened and hair is removed using proteases. In brewing, amylases are used in germinating barley. In cheese-making, rennin is used to coagulated the proteins in mil. The biofuels industry, for example, has been a point of focus recently, naturally focusing on fuel products to replace petroleum-based fuels and, as a result, has not developed other valuable chemical products that also rely on petroleum-based processes.

[0009] As such, biorefineries use enzymes to convert natural products to useful chemicals. A natural product, such as the wood that is used in a pulp and paper mill, contains cellulose, hemicelluloses, and lignin. A typical range of compositions for a hardwood may be about 40-44% cellulose, about 15-35% hemicelluloses, and about 18-25% lignin. Likewise, a typical range of compositions for a softwood may be about 40-44% cellulose, about 20-32% hemicelluloses, and about 25-35% lignin. Since all biofuels come from cellulosic biorefineries, where the key raw material is glucose, derived from cellulose, lignin remains underutilized. Lignin is the single most abundant source of aromatic compounds in nature, and the use of lignin is currently limited to low value applications, such as combustion to generate process heat and energy for the biorefinery facilities. In the alternative, lignin is sold as a natural component of animal feeds or fertilizers. Interestingly, however, lignin is the only plant biomass component based on aromatic core structures, and such core structures are valuable in the production of industrial chemicals. One of skill will appreciate that, unfortunately, a major problem to such a use of lignin remains: the aromatic compounds present in the lignin fraction of a biorefinery include toxic compounds that inhibit the growth and survival of industrial microbes. For at least these reasons, processes for converting lignin fractions to industrial products using industrial microbes have not been successful.

[0010] In view of the above, one of skill will appreciate (i) a clean, green replacement for petroleum-based processes in the production of valuable chemical products that include major markets such as, for example, pharmaceuticals, agrochemicals, food ingredients, and plastics; (ii) a profitable use of the abundant and renewable natural resource available in lignin, which is currently an industrial waste stream that is underutilized as an industrial feedstock; (iii) a selection of host cells that are tolerant to the toxic compounds present in lignin fractions in the feedstock; (iv) a selection of polypeptides that can be used as enzymes in the bioconversion of the lignin fractions to the valuable chemical products; (v) a selection of polynucleotides that can be used to transform host cells to express the selection of polypeptides in the bioconversion of the lignin fractions to the valuable chemical products; (vi) systems that include transformants that express the enzymes, where the transformants can be used to (a) express the enzymes while in direct contact with the lignin fractions or (b) express the enzymes for extraction from the cells, after which the extracted enzymes are used directly in contact with the lignin fractions; and (vii) a clean-and-green method of producing valuable chemical products at higher profits than petroleum-based processes.

### SUMMARY

[0011] This invention is generally directed to a recombinant method of producing enzymes for use in the bioconversion of lignin-derived compounds to valuable aromatic chemicals. In some embodiments, the teachings are directed to an isolated recombinant polypeptide, comprising an amino acid sequence having at least 95% identity to SEQ ID NO:101. The sequence can conserve residues T19, I20, S21, P22, V24, W25, T27, K28, Y29, A30, H33, K34, G35, F36, D39, I40, V41, P42, G43, G44, F45, G47, I48, E50, R51, T52, G53, G54, K100, A101, N104, V111, G112, M115, F116, P166, W107, Y184, Y187, R188, G191, G192, and F195.

[0012] In some embodiments, the teachings are directed to an isolated recombinant polypeptide, comprising SEQ ID NO:101; or conservative substitutions thereof outside of the conserved residues. The conserved residues can include T19, I20, S21, P22, V24, W25, T27, K28, Y29, A30, H33, K34, G35, F36, D39, I40, V41, P42, G43, G44, F45, G47, I48, E50, R51, T52, G53, G54; K100, A101, N104, V111, G112, M115, F116, P166, W107, Y184, Y187, R188, G191, G192, and F195.

[0013] In some embodiments, the teachings are directed to an isolated recombinant glutathione S-transferase enzyme, comprising an amino acid sequence having at least 95% identity to SEQ ID NO:101. The amino acid sequence can conserve residues T19, I20, S21, P22, V24, W25, T27, K28, Y29, A30, H33, K34, G35, F36, D39, I40, V41, P42, G43, G44, F45, G47, I48, E50, R51, T52, G53, G54; K100, A101, N104, V111, G112, M115, F116, P166, W107, Y184, Y187, R188, G191, G192, and F195; wherein the amino acid sequence functions to cleave a beta-aryl ether.

[0014] In some embodiments, the teachings are directed to an isolated recombinant glutathione S-transferase enzyme, comprising an amino acid sequence having at least 95% identity to SEQ ID NO:101; wherein, the amino acid sequence functions to cleave a beta-aryl ether.

[0015] In some embodiments, the teachings are directed to an isolated recombinant polypeptide, comprising (i) a length ranging from about 279 to about 281 amino acids; (ii) a first amino acid region consisting of residues 19-54 from SEQ ID NO:101, or conservative substitutions thereof outside of conserved residues T19, I20, S21, P22, V24, W25, T27, K28, Y29, A30, H33, K34, G35, F36, D39, I40, V41, P42, G43, G44, F45, G47, I48, E50, R51, T52, G53, and G54; wherein, the first amino acid region can be located in the recombinant polypeptide from about residue 14 to about residue 59; and, (iii) a second amino acid region consisting of residues 98-221 from SEQ ID NO:101, or conservative substitutions thereof outside of conserved residues K100, A101, N104, V111, G112, M115, F116, P166, W107, Y184, Y187, R188, G191, G192, and F195; wherein, the second amino acid region is located in the recombinant polypeptide from about residue 93 to about residue 226.

[0016] In some embodiments, the teachings are directed to an isolated recombinant glutathione S-transferase enzyme, comprising (i) a length ranging from about 279 to about 281 amino acids; (ii) a first amino acid region having at least 95% identity to residues 19-54 from SEQ ID NO:101 while conserving residues T19, I20, S21, P22, V24, W25, T27, K28, Y29, A30, H33, K34, G35, F36, D39, I40, V41, P42, G43, G44, F45, G47, I48, E50, R51, T52, G53, and G54; wherein, the first amino acid region is located in the recombinant polypeptide from about residue 14 to about residue 59; and, (iii) a second amino acid region having at least 95% identity to residues 98-221 from SEQ ID NO:101 while conserving residues K100, A101, N104, V111, G112, M115, F116, P166, W107, Y184, Y187, R188, G191, G192, and F195; wherein, the second amino acid region can be located in the recombinant polypeptide from about residue 93 to about residue 226; and, the recombinant glutathione S-transferase enzyme can function to cleave a beta-aryl ether.

[0017] In some embodiments, the teachings are directed to an isolated recombinant glutathione S-transferase enzyme, comprising an amino acid sequence having at least 95% identity to SEQ ID NO:541; wherein, the amino acid sequence functions to cleave a beta-aryl ether.

[0018] In some embodiments, the teachings are directed to an isolated recombinant polypeptide, comprising (i) a length ranging from about 256 to about 260 amino acids; (ii) a first amino acid region consisting of residues 47-57 from SEQ ID NO:541, or conservative substitutions thereof outside of conserved residues A47, I48, N49, P50, G52, V54, P55, V56, L57; wherein, the first amino acid region is located in the recombinant polypeptide from about residue 45 to about residue 57; (iii) a second amino acid region consisting of 63-76 from SEQ ID NO:541; and, (iv) a third amino acid region consisting of residues 99-230 from SEQ ID NO:541, or conservative substitutions thereof outside of conserved residues R100, Y101, K104, D107, M111, N112, S115, M116, K176, L194, I197, N198, S201, H202, and M206; wherein, the second amino acid region is located in the recombinant polypeptide from about residue 94 to about residue 235.

[0019] In some embodiments, the teachings are directed to an isolated recombinant glutathione S-transferase enzyme, comprising (i) a length ranging from about 279 to about 281 amino acids; (ii) a first amino acid region having at least 95% identity to 47-57 from SEQ ID NO:541, or conservative substitutions thereof outside of conserved residues A47, I48, N49, P50, G52, V54, P55, V56, L57; wherein, the first amino acid region can be located in the recombinant polypeptide from about residue 45 to about residue 57; (iii) a second amino acid region consisting of 63-76 from SEQ ID NO:541; and, (iv) a third amino acid region having at least 95% identity to residues 99-230 from SEQ ID NO:541, or conservative substitutions thereof outside of conserved residues R100, Y101, K104, D107, M111, N112, S115, M116, K176, L194, I197, N198, S201, H202, and M206; wherein, the second amino acid region can be located in the recombinant polypeptide from about residue 94 to about residue 235; wherein, the recombinant glutathione S-transferase enzyme functions to cleave a beta-aryl ether.

[0020] In some embodiments, an amino acid substitution outside of the conserved residues can be a conservative substitution. And, in many embodiments, the amino acid sequence can function to cleave a beta-aryl ether.

[0021] The teachings are also directed to a method of cleaving a beta-aryl ether bond, the comprising contacting a polypeptide taught herein with a lignin-derived compound having (i) a beta-aryl ether bond and (ii) a molecular weight ranging from about 180 Daltons to about 3000 Daltons; wherein, the contacting occurs in a solvent environment in which the lignin-derived compound is soluble.

[0022] In some embodiments, the lignin-derived compound has a molecular weight of about 180 Daltons to about 1000 Daltons. In some embodiments, the solvent environment comprises water. And, in some embodiments, the solvent environment comprises a polar organic solvent.

[0023] The teachings are also directed to a system for bioprocessing lignin-derived compounds, the system comprising a polypeptide taught herein, a lignin-derived compound having a beta-aryl ether bond and a molecular weight ranging from about 180 Daltons to about 3000 Daltons; and, a solvent in which the lignin-derived compound is soluble; wherein, the system functions to cleave the beta-aryl ether bond by contacting the polypeptide with the lignin-derived compound in the solvent.

[0024] The teachings are also directed to a recombinant polynucleotide comprising a nucleotide sequence that encodes a polypeptide taught herein. Likewise, the teachings are also directed to a vector or plasmid comprising the polynucleotide, as well as a host cell transformed by the vector or plasmid to express the polypeptide.

[0025] The teachings are also directed to a method of cleaving a beta-aryl ether bond, the method comprising (i) culturing a host cell taught herein under conditions suitable to produce a polypeptide taught herein; (ii) recovering the polypeptide from the host cell culture; and, (iii) contacting the polypeptide of claim 1 with a lignin-derived compound having a beta-aryl ether bond and a molecular weight ranging from about 180 Daltons to about 3000 Daltons; wherein, the contacting occurs in a solvent environment in which the lignin-derived compound is soluble.

[0026] In some embodiments, the host cell can be E. Coli or an Azotobacter strain, such as Azotobacter vinelandii. And, in some embodiments, the lignin-derived compound can have a molecular weight of about 180 Daltons to about 1000 Daltons.

[0027] The teachings are also directed to a system for bioprocessing lignin-derived compounds, the system comprising (i) a transformed host cell taught herein; (ii) a lignin-derived compound having a beta-aryl ether bond and a molecular weight ranging from about 180 Daltons to about 3000 Daltons; and, (iii) a solvent in which the lignin-derived compound is soluble; wherein, the system functions to cleave the beta-aryl ether bond by contacting a polypeptide taught herein with the lignin-derived compound in the solvent.

### BRIEF DESCRIPTION OF THE DRAWINGS

[0028] FIGS. 1A and 1B illustrate general concepts of the biorefinery and discovery processes discussed herein, according to some embodiments.

[0029] FIG. 2 illustrates the structures of some building block chemicals that can be produced using bioconversions, according to some embodiments.

[0030] FIG. 3 is an example of a beta-etherase catalyzed hydrolysis of a model lignin dimer, α-O-(β-methylumbelliferyl) acetovanillone (MUAV), according to some embodiments.

[0031] FIG. 4 illustrates unexpected results from biochemical activity assays for beta-etherase function for the S. paucimobilis positive control polypeptides, and the N. aromaticivorans putative beta-etherase polypeptide, according to some embodiments.

[0032] FIG. 5 illustrates beta-aryl-ether compounds to be tested as substrates representing native lignin structures, according to some embodiments.

[0033] FIG. 6 illustrates pathways of guaiacylglycerol-β-guaiacyl ether (GGE) metabolism by S. paucimobilis, according to some embodiments.

[0034] FIG. 7 illustrates an example of a biochemical process for the production of catechol from lignin oligomers, according to some embodiments.

[0035] FIG. 8 illustrates an example of a biochemical process for the production of vanillin from lignin oligomers, according to some embodiments.

[0036] FIG. 9 illustrates an example of a biochemical process for the production of 2,4-diaminotoluene from lignin oligomers, according to some embodiments.

[0037] FIG. 10 illustrates process schemes for additional product targets that include ortho-cresol, salicylic acid, and aminosalicylic acid, for the production of valuable chemicals from lignin oligomers, according to some embodiments.

### DETAILED DESCRIPTION OF THE INVENTION

[0038] This invention is generally directed to a recombinant method of producing enzymes for use in the bioconversion of lignin-derived compounds to valuable aromatic chemicals. Currently, the art is limited in it's ability to control the degradation of lignin to produce useful products, as it's limited in it's knowledge of enzymes that are capable of selectively converting lignin into desired aromatic compounds. Generally, the art knows two basic things: (1) lignin is complex; and (2) bacterial lignin degradation systems are therefore at least as complex as lignin itself. Accordingly, and for at least these reasons, the teachings provided herein offer a valuable, unexpected, and surprising set of systems, methods, and compositions of matter that will be useful in the production of industrially useful aromatic chemicals.

[0039] FIGS. 1A and 1B illustrate general concepts of the biorefinery and discovery processes discussed herein, according to some embodiments. FIG. 1A shows a generalized example of a use of recombinant microbial strains in biotransformations for the production of aromatic chemicals from lignin-derived compounds. Biorefinery process 100 converts a soluble biorefinery lignin 105 through a series of biotransformations using a transformed host cell. The biorefinery lignin 105 is a feedstock comprising a lignin-derived compound which can be, for example, a combination of lignin-derived monomers and oligomers. “Biotransformation 1” 107 can be used to selectively cleave a bond on or between monomers to create additional lignin monomers 110. “Biotransformation 2” 112 can be used to selectively cleave an additional bond on or between monomers to create mono-aromatic commercial products 115. FIG. 1B shows a discovery process 120, which includes selecting a host cell strain that is tolerant to toxic lignin-derived compounds. The strain acquisition 125 includes growth of the strain, sample preparation, and storage. A set of bacterial strains are obtained for testing strain tolerance to soluble biorefinery lignin samples.

[0040] In some embodiments, the strains can be selected for (i) having well-characterized aromatic and xenobiotic metabolisms; (ii) annotated genome sequences; and (iii) prior use in fermentation processes at pilot or larger scales. Examples of strains can include, but are not limited to, Azotobacter vinelandii (ATCC BAA-1303 DJ), Azotobacter chroococcum (ATCC 4412 (EB Fred) X-50), Pseudomonas putida (ATCC BAA-477 Pf-5), Pseudomonas fluorescens (ATCC 29837 NCTC 1100). Stains can be streaked on relevant rich media plates as described by the accompanying ATCC literature for revival. Individual colonies (5 each) can be picked and cultured on relevant liquid media to saturation. Culture samples prepared in a final glycerol concentration of 12.5% can be flash-frozen and stored at −80° C.

[0041] The model substrate synthesis 150 for use in the biochemical screening for selective activity can be outsourced through a contract research organization (CRO). The enzyme discovery effort can initially be focused on identifying potential beta-etherase candidate genes identified through bioinformatic methods. The identification of candidates having beta-etherase activity is the 1st step towards generating lignin monomers from lignin oligomers present in soluble lignin streams. The fluorescent substrate α-O-(β-methylumbelliferyl) acetovanillone (MUAV), for example, can be used in in vitro assays to identify beta-etherase function (Acme Biosciences, Mt. View, Calif.). The formation of 4 methylumbelliferone (4MU) upon hydrolysis of the aryl ether bond can be monitored by fluorescence, for example, at λex=365 nm and λem=450 nm (or 460 nm).

[0042] The gene synthesis, cloning, and transformation step 145 can include combining bioinformatic methods with known information about enzymes showing a desired, selective enzyme activity. For example, bioinformatics can produce a putative beta-etherase sequence that shares a significant homology to the S. paucimobilis ligE and ligF beta-etherase sequences. See Masai, E., et al. Journal of Bacteriology (3):1768-1775 (2003) (“Masai”), which is hereby incorporated herein in it's entirety by reference. The S. paucimobilis sequences can be used as positive controls for biochemical assays to show relative activities in an enzyme discovery strategy.

[0043] The gene synthesis, cloning, and transformation step 145 can be performed using any method known to one of skill. For example, all genes can be synthesized directly as open reading frames (ORFs) from oligonucleotides by using standard PCR-based assembly methods, and using the E. coli codon bias. The end sequences can contain adaptors (BamHI and HindIII) for restriction digestion and cloning into the E. coli expression vector pET24a (Novagen). Internal BamHI and HindIII sites can be excluded from the ORF sequences during design of the oligonucleotides. Assembled genes can be cloned into the proprietary cloning vector (pGOV4), transformed into E. coli CH3 chemically competent cells, and DNA sequences determined (Tocore Inc.) from purified plasmid DNA. After sequence verification, restriction digestion can be used to excise each ORF fragment from the cloning vector, and the sequence can be sub-cloned into pET24a. The entire set of ligE and ligF bearing plasmids can then be transformed into E. coli BL21 (DE3) which can serve as the host strain for beta-etherase expression and biochemical testing.

[0044] The enzyme screening 155 is done to identify novel etherases 160. The fluorescent substrate MUAV can be used to screen for and identify beta-etherase activity from the recombinant E. coli clones. Expression of the beta-etherase genes can be done in 5 ml or 25 ml samples of the recombinant E. coli strains in LB medium using induction with IPTG. Following induction, and cell harvest, cell pellets can be lysed using the BPER (Invitrogen) cell lysis system. Cell extracts can be tested in the in vitro biochemical assay for beta-etherase activity on the fluorescent substrate MUAV. The formation of 4 methylumbelliferone (4MU) upon hydrolysis of the aryl ether bond in MUAV can be monitored by fluorescence at λex=365 nm and λem=460 nm, and can provide quantitative measurement of beta-etherase function. Cell extracts of E. coli transformed with the S. paucimobilis ligE and ligF genes can be the assay positive controls. Test or unknown samples can include, for example, E. coli strains expressing putative beta-etherase genes from N. aromaticovorans.

[0045] The lignin stream acquisition 130 includes a waste lignin stream from a biorefinery for testing. A preliminary characterization of one source of such lignin has shown an aromatic monomer concentration of less than 1 g/L and an oligomer concentration of ˜10 g/L. Oligomers appear to be associated with carbohydrates in 10:1 ratio for sugar:phenolics. Some information exists on compounds in the liquid stream, including benzoic acid, vanillin, syringic acid and ferulics, which are routinely quantified in soluble samples. An average molecular weight of −280 has been established for the monomers; and the oligomeric components remain to be characterized.

[0046] The strain tolerance testing 135 Strain tolerance will be determined by cell growth upon exposure to biorefinery lignin. Tolerance to the phenolic compounds in biorefinery lignin waste stream will be critically important to the bioprocess efficiency and high level production of aromatic chemicals by microbial systems. Cell growth will be quantified as a function of respiration by the reduction of soluble tetrazolium salts. XTT (2,3-Bis(2-methoxy-4-nitro-5-sulfophenyl)-2H-tetrazolium-5-carboxanilide inner salt, Sigma) is reduced to a soluble purple formazan compound by respiring cells. The formazan product will be detected and quantified by absorbance at 450 nm.

[0047] Strain tolerance testing 135 on soluble lignin can be done in liquid format in 48 well plates, for example. Each strain can be tested in replicates of 8, for example, and E. coli can be used as a negative control strain. Strains can first be grown in rich medium to saturation, washed, and OD600 nm of the cultures determined. Equal numbers of bacteria can be inoculated into wells of the 48-well growth plate containing minimal medium excluding a carbon source. Increasing concentrations of soluble lignin fractions, in addition to a minus-lignin positive control, can be added to the wells containing each species to a final volume of 0.8 ml. A benzoic acid content analysis of the lignin fractions can be used as an internal indicator of the phenolic content of lignin wastes of different origin. Following incubation for 24-48 hours with shaking at 30° C., the cultures can be tested for growth upon exposure to the lignin fraction using an XTT assay kit. Culture samples can be removed from the 48 well growth plate and diluted appropriately in 96 well assay plates to which the XTT reagent can be added. The soluble formazan produced will be quantified by absorbance at 450 nm. Bacterial strains exhibiting the highest level of growth, and therefore tolerance, can be candidates for further development as host strains for lignin conversions.

[0048] The strain demonstrated to have the best tolerance characteristics can be transformed with the beta-etherase gene identified as showing the highest biochemical activity. Restriction digestion can be used to excise the ORF fragment from the cloning vector, and the sequence can be sub-cloned into the shuttle vector pMMB206. Constructs cloned in the shuttle vector can be transformed into Azotobacter or Pseudomonas strains by electroporation, or chemical transformation. The recombinant, lignin tolerant host strain can be re-tested for beta-etherase expression and activity using any methods known to one of skill, such as those described herein, adapted to the particular host strain being used.

Feedstock from Biorefinery Processes

[0049] An example of a starting material might be pretreated lignocellulosic biomass. In some embodiments, the lignocellulose biomass material might include grasses, corn stover, rice hull, agricultural residues, softwoods and hardwoods. In some embodiments, the lignin-derived compounds might be derived from hardwood species such as poplar from the Upper Peninsula region of Michigan, or hardwoods such as poplar, lolloby pine, and eucalyptus from Virginia and Georgia areas, or mixed hardwoods including maple and oak species from upstate New York.

[0050] In some embodiments, the pretreatment methods might encompass a range of physical, chemical and biological based processes. Examples of pretreatment methods used to generate the feedstock for Aligna processes might include physical pretreatment, solvent fractionation, chemical pretreatment, biological pretreatment, ionic liquids pretreatment, supercritical fluids pretreatment, or a combination thereof, for example, which can be applied in stages.

[0051] Physical pretreatment methods used to reduce the lignocellulose biomass particle size reduction might utilize mechanical stress methods of dry, wet vibratory and compression-based ball milling procedures. Solvent fractionation methods include organosolve processes, phosphoric acid fractionation processes, and methods using ionic liquids to pretreat the lignocellulose biomass to differentially solubilize and partition various components of the biomass. In some embodiments, organosolve methods might be performed using alcohol, including ethanol, with an acid catalyst at temperature ranges from about 90 to about 20° C., and from about 155 to about 220° C. with residence time of about 25 minutes to about 100 minutes. Catalyst concentrations can vary from about 0.83% to about 1.67% and alcohol concentrations can vary from about 25% to about 74% (v/v). In some embodiments, phosphoric acid fractionations of lignocellulose biomass might be performed using a series of different extractions using phosphoric acid, acetone, and water at temperature of around 50° C. In some embodiments, ionic liquid pretreatment of lignocellulose biomass might include use of ionic liquids containing anions like chloride, formate, acetate, or alkylphosphonate, with biomass:ionic liquids ratios of approximately 1:10 (w/w). The pretreatment might be performed at temperatures ranging from about 100° C. to about 150° C. Other ionic liquid compounds that might be used include 1-butyl-3-methyl-imidazolium chloride and 1-ethyl-3-methylimidazolium chloride.

[0052] Chemical pretreatments of lignocellulose biomass material might be performed using technologies that include acidic, alkaline and oxidative treatments. In some embodiments, acidic pretreatment methods of lignocellulose biomass such as those described below might be applied. Dilute acid pretreatments using sulfuric acid at concentrations in the approximate range of about 0.05% to about 5%, and temperatures in the range of about 160° C. to about 220° C. Steam explosion, with or without the use of catalysts such as sulfuric acid, nitric acid, carbonic acid, succinic acid, fumaric acid, maleic acid, citric acid, sulfur dioxide, sodium hydroxide, ammonia, before steam explosion, at temperatures between about 160° C. to about 290° C. Liquid hot water treatment at pressure >5 MPa at temperatures ranging from about 160° C. to about 230° C., and pH range between about 4 and about 7. And, in some embodiments, alkaline pretreatment methods using catalysts such as calcium oxide, ammonia, and sodium hydroxide might be used. The ammonia fiber expansion (AFEX) method might be applied in which concentrated ammonia at about 0.3 kg to about 2 kg of ammonia per kg of dry weight biomass is used at about 60° C. to about 140° C. in a high pressure reactor, and cooked for 5-45 minutes before rapid pressure release. The ammonia recycle percolation (ARP) method might be used in flow through mode by percolating ammoniacal solutions at 5-15% concentrations at high temperatures and pressures. Oxidative pretreatment methods such as alkaline wet oxidation might be used with sodium carbonate at a temperature ranging from about 170° C. to about 220° C. in a high pressure reactor using pressurized air/oxygen mixtures or hydrogen peroxide as the oxidants.

[0053] Biological pretreatment methods using white rot basidomycetes and certain actinomycetes might be applied. One type of product stream from such pretreatment methods might be soluble lignin, and might contain lignin-derived monomers and oligomers in the range of about 1 g/L to about 10 g/L, and xylans. The lignin-derived monomers might include compounds such as gallic acid, hydroxybenzoate, ferulic acid, hydroxymethyl furfural, hydroxymethyl furfural alcohol, vanillin, homovanillin, syringic acid, syringaldehyde, and furfural alcohol.

[0054] Supercritical fluid pretreatment methods might be used to process the biomass. Examples of supercritical fluids for use in processing biomass include ethanol, acetone, water, and carbon dioxide at a temperature and pressures above the critical points for ethanol and carbon dioxide but at a temperature and/or pressure below that of the critical point for water.

[0055] Combinations of steam pretreatment and biological pretreatment methods might be applied. For example, a biomass steam can be pretreated at 195° C. for 10 min at controlled pH, followed by enzymatic treatment using commercial cellulases and xylanases at dosings of 100 mg protein/g total solid, and with incubation at 50° C. at pH 5.0 with agitation of 500 rpm.

[0056] In some embodiments, combinations of hydrothermal, organosolve, and biological pretreatment methods might be used. One example of such a combination is a 3 stage process:

Stage 1. Use heat in an aqueous medium at a predetermined pH, temperature and pressure for the hydrothermal process;
Stage 2. Use at least one organic solvent from those described in 6-6c in water for the organosolve step;
Stage 3. Use yeast, white rot basidomycetes, actinomycetes, and cellulases and xylanases in native or recombinant forms for the biological pretreatment step.

[0057] Soluble lignin fractions derived using organosolve methods might produce soluble lignins in the molecular weight range of 188-1000, soluble in various polar solvents. Without intending to be bound by any theory or mechanism of action, organosolve processes are generally believed to maintain the lignin beta-aryl ether linkage.

[0058] Lignin streams from steam exploded lignocellulosic biomass might be used. Steam explosion might be performed, for example, using high pressure steam in the range of about 200 psi to about 500 psi, and at temperatures ranging from about 180° C. to about 230° C. for about 1 minute to about 20 minutes in batch or continuous reactors. The lignin might be extracted from the steam-exploded material with alkali washing or extraction using organic solvents. Steam exploded lignins can exhibit properties similar to those described form organosolve lignins, retaining native bond structures and containing about 3 to about 12 aromatic units per oligomer unit.

[0059] Supercritical fluid pretreatment can produce soluble lignin fractions that can be used with the teachings provided herein. Such processes typically yield monomers and lignin oligomers having a molecular weight of about <1000 Daltons.

[0060] Biological pretreatment can produce soluble lignin fractions that can be used with the teachings provided herein. Such lignin streams might contain lignin monomers and oligomers in the range of about 1 g/L to about 10 g/L and have a molecular weight of about <1000 Daltons, and xylans. The lignin-derived monomers might include compounds such as gallic acid, hydroxybenzoate, ferulic acid, hydroxymethyl furfural, hydroxymethyl furfural alcohol, vanillin, homovanillin, syringic acid, syringaldehyde, and furfural alcohol.

Feedstock from Wood Pulping Processes

[0061] Wood pulping processes produce a variety of lignin types, the type of lignin dependent on the type of process used. Chemical pulping processes include, for example, Kraft and sulfite pulping.

[0062] In some embodiments, the lignin-derived compound can be derived from a spent pulping liquor or “black liquor” from Kraft pulping processes. Kraft lignin might be derived from batch or continuous processes using, for example, reaction temperatures in the range of about 150° C. to about 200° C. and reaction times of approximately 2 hours. Any range of molecular weights of lignin may be obtained, and the useful fraction may range, in some embodiments, from about 200 Daltons to about 4000 Daltons. A Kraft lignin having a molecular weight ranging from about 1000 Daltons to about 3000 Daltons might be used in a bioconversion.

[0063] In some embodiments, lignin from a sulfite pulping process might be used. A sulfite pulping process can include, for example, a chemical sulfonation using aqueous sulfur dioxide, bisulfite and monosulfite at a pH ranging from about 2 to about 12. The sulfonated lignin might be recovered by precipitation with excess lime as lignosulfonates. Alternatively, formaldehyde-based methylation of the lignin aromatics followed by sulfonation might be performed. Any range of molecular weights of lignin may be obtained, and the useful fraction may range, in some embodiments, from about 200 Daltons to about 4000 Daltons. A sulfite lignin having a molecular weight ranging from about 1000 Daltons to about 3000 Daltons might be used in a bioconversion.

### Characterization of Lignin-Derived Compounds for Use in Bioconversion

[0064] Optimization of a system for a particular feedstock should include an understanding of the composition of the particular feedstock. For example, one of skill will appreciate that the composition of a native lignin can be significantly different than the composition of the lignin-derived compounds in a given lignin faction that is used for a feedstock. Accordingly, and understanding of the composition of the feedstock will assist in optimizing the conversion of the lignin-derived compounds to the valuable aromatic compounds. Any method known to one of skill can be used to characterize the compositions of the feedstock. For example, one of skill may use wet chemistry techniques, such as thioacidolysis and nitrobenzene oxidation, coupled with gas chromatography, which have been used traditionally, or spectroscopic techniques such as NMR and FTIR. Thioacidolysis, for example, cleaves the β-O-4 linkages in lignin, giving rise to monomers and dimers which are then used to calculate the S and G content. Similar information can be obtained using nitrobenzene oxidation, but the ratios are thought to be less accurate. In some embodiments, the content of S, G, and H, as well as their relative ratios can be used to characterize feedstock compositions for purposes of determining a bioconversion system design.

[0065] It is widely accepted that the biosynthesis of lignin stems from the polymerization of three types of phenylpropane units, also referred to as monolignols. These units are coniferyl, sinapyl, and p-coumaryl alcohol. The three structures are as follows:

[chemical structure]

[0066] Tables 1A and 1B summarize distributions of p-coumaryl alcohol or p-hydroxylphenol (H), coniferyl alcohol or guaiacyl (G), and sinapyl alcohol or syringyl (S) lignin in several sources of biomass. Table 1A compares percent lignin in the biomass to the G:S:H.

TABLE 1A

| | % Lignin | G: | S: | H |
|---|---|---|---|---|
| Wheat Straw | 16-21 | 45 | 46 | 9 |
| Rice Straw | 6 | 45 | 40 | 15 |
| Rye Straw | 18 | 43 | 53 | 1 |
| Hemp | 8-13 | 51 | 40 | 9 |
| Tall Fescue: | | | | |
| Stems | 7-10 | 55 | 42 | 3 |
| Internodes | 11 | 48 | 50 | 2 |
| Flax | 21-34 | 67 | 29 | 4 |
| Jute | 15-26 | 36 | 62 | 2 |
| Sisal | 7-14 | 22 | 76 | 2 |
| Curaua Leaf fiber | 7 | 29 | 41 | 30 |
| Banana Plant Leaf | | 43 | 50 | 7 |
| Piassava Fiber | 45 | 40 | 9 | 51 |
| (Plam Tree) | | | | |
| Abaca | 7-9 | 19 | 55 | 26 |
| Loblolly Pine | 29 | 86 | 2 | 12 |
| | 29 | 87 | 0 | 13 |
| Compression | | 60 | | 40 |
| Spruce (Picea Abies) | 28 | 94 | 1 | 5 |
| MWL | | 98 | 2 | 0 |
| Eucalyptus globus | 22 | 14 | 84 | 2 |
| Eucalyptus grandis | 27 | 27 | 69 | 4 |
| Birch pendula | 22 | 29 | 69 | 2 |
| Beech | 26 | 56 | 40 | 4 |
| Acacia | 28 | 48 | 49 | 3 |

Table 1A compares location of a sample in the biomass, species, and environmental stress to the G:S:H.

TABLE 1B

| White Birch | G: | S |
|---|---|---|
| Fiber, S2 layer | 12 | 88 |
| Vessel, S2 Layer | 88 | 12 |
| Ray parenchyma, S-layer | 49 | 51 |
| Middle lamella (fiber/fiber) | 91 | 9 |
| Middle lamella (fiber/vessel) | 80 | 20 |
| Middle lamella (fiber/ray) | 100 | 0 |
| Middle lamella (ray/ray) | 88 | 12 |

| | G: | S: | H |
|---|---|---|---|
| Lignin Samples | | | |
| Carpinus betulus MWL | 19 | 80 | 1 |
| Eucryphia codrifolia MWL | 35 | 59 | 6 |
| Bambusa sp. MWL | 23 | 57 | 20 |
| Fagus sylvatica kraft lignin | 25 | 72 | 3 |
| Eucalyptus globulus kraft lignin | 22 | 73 | 6 |
| Lobolly Pine Juvenile | | | |
| Normal | 95 | | 5 |
| Wind Opposite | 96 | | 4 |
| Wind Compression | 89 | | 11 |
| Bent Opposite | 96 | | 4 |
| Bent Compression | 88 | | 12 |

[0067] In general, the relative amounts of G, S, and H in lignin can be a good indicator of its overall composition and response to a treatment, such as the bioconversions taught herein. In poplar species, for example, differences can be seen based on the measurement technique as well as species, but in general the S/G ratio ranges from 1.3 to 2.2. This is similar to the hardwood eucalyptus, but higher than herbaceous biomass switchgrass and Miscanthus. This is to be expected given the higher H contents in grass lignin. An optimized nitrobenzene oxidation method has shown S/G ratios of 13 poplar samples from two different sites and obtained values ranging from 1.01 to 1.68. Further, a linear correlation (R²=0.85) has been found in poplar between decreasing lignin content and increasing S/G ratios. The correlation was stronger (R²=0.93) in samples from a single site suggesting a dependency on geographic location.

[0068] Higher throughput methods can be used for rapid screening of feedstocks. Examples of such methods can include, but are not limited to, near-infrared (NIR), reflectance spectroscopy, pyrolysis molecular beam mass spectrometry (pyMBMS), Fourier transform infrared spectroscopy, a modified thioacidolysis technique, and whole cell NMR after dissolution in ionic liquids. Information on some structural characteristics of lignin, such as S/G ratios, can be rapidly obtained using these methods. The average S:G:H ratio of 104 poplar lignin samples, for example, was determined using the modified thioacidolysis technique, and was found to be 68:32:0.02. In some embodiments, the S, G, and H components in the ratio can be expressed as mass percent. In some embodiments, the S, G, and H components in the ratio can be expressed as any relative unit, or unitless. Any comparison can be used, if the amount of each component directly correlates with the other respective components in the composition. The ratios can be expressed in relative whole numbers or fractions as S:G:H, or any other order or combination of components, S/G, G/S, and the like. In some embodiments, the S/G ratio is used. In some embodiments, the S/G ratio can range from about 0.20 to about 20.0, from about 0.3 to about 18.0, from about 0.4 to about 15.0, from about 0.5 to about 15.0, from about 0.6 to about 12.0, from about 0.7 to about 10.0, from about 0.8 to about 8.0, from about 0.9 to about 9.0, from about 1.0 to about 7.0, or any range therein. In some embodiments, the S/G ratio can be about 0.2, about 0.4, about 0.6, about 0.8, about 1.0, about 1.2, about 1.4, about 1.6, about 1.8, about 2.0, about 2.2, about 2.4, about 2.6, about 2.8, about 3.0, about 3.2, about 3.4, about 3.6, about 3.8, about 4.0, about 4.2, about 4.4, about 4.6, about 4.8, about 5.0, about 5.2, about 5.4, about 5.6, about 5.8, about 6.0, about 6.2, about 6.4, about 6.6, about 6.8, about 7.0, about 7.2, about 7.4, about 7.6, about 7.8, about 8.0, about 8.2, about 8.4, about 8.6, about 8.8, about 9.0, about 9.2, about 9.4, about 9.6, about 9.8, about 10.0, and any ratio in-between on 0.1 increments, and any range of ratios therein.

### Fractionation of Lignin-Derived Compounds for Use in Bioconversion

[0069] Soluble lignin streams derived from biorefinery or Kraft processes might be used directly in microbial conversions without additional purification or, they might be further purified by one or more of the separation or fractionation techniques prior to microbial conversions.

[0070] In some embodiments, membrane filtration might be applied to achieve a starting concentration of lignin monomers and oligomers in the 1-60% (w/v) concentration range, and molecular weights ranging from about 180 Daltons to about 2000 Daltons, from about 200 Daltons to about 4000 Daltons, from about 250 Daltons to about 2500 Daltons, from about 180 Daltons to about 3500 Daltons, from about 300 Daltons to about 3000 Daltons, or any range therein.

[0071] In some embodiments, soluble lignin streams might be partially purified by chromatography using, for example, HP-20 resin. The lignin monomers and oligomers can bind to the resin while highly polar impurities or inorganics that might be toxic to microorganisms can remain un-bound. Subsequent elution, for example, with a methanol-water solvent system, can provide fractions of higher purity that are enriched in lignin monomers and oligomers.

### Chemical Products

[0072] A purpose of the present teaching includes the discovery of novel biochemical conversions that create valuable commercial products from various lignin core structures. Such commercial products include monomeric aromatic chemicals that can serve as building block chemicals. One of skill will appreciate that a vast number of aromatic chemicals can be produced using the principles provided by the teachings set-forth herein, and that a comprehensive teaching of every possible chemical that can be produced would be beyond the scope and purpose of this teaching.

[0073] FIGS. 2A and 2B illustrate (i) the structures of some building block chemicals that can be produced using bioconversions, and (ii) an example enzyme system from a Sphingomonaas paucimobilis gene cluster, according to some embodiments. FIG. 2A shows that examples of some monomeric aromatic structures that can serve as building block chemicals derived from lignin include, but are not limited to, guaiacol, β-hydroxypropiovanillone, 4-hydroxy-3 methoxy mandelic acid, coniferaldehyde, ferulic acid, eugenol, propylguaicol, and 4-acetylguaiacol. It should be appreciated that each of these structures can be produced using the teachings provided herein. FIG. 2B(i) shows the organization of the LigDFEG gene cluster in a Sphingomonaas paucimobilis strain. FIG. 2B(ii) shows deduced functions of the gene products believed to be involved in a β-aryl ether bond cleavage in a model lignin structure, guaiacylglycerol-β-guaiacyl ether (GGE). The vertical bars above the restriction map indicate the positions of the gene insertions of LigD, LigF, LigE, and LigG. LigD shoed Cα-dehydrogenase activity, LigF and LigE showed β-etherase activity, and LigG showed glutathione lyase activity. FIG. 2 LEGEND (Abbreviations): restriction enzymes Ap (ApaI), Bs (BstXI), E (EcoRI), Ec (Eco47III), MI (MluI), P (PstI), RV (EcoRV), S, (SalI), Sc (SacI). ScII (SncII), St (StuI), Sm (SmaI), Tt (TthIIII), and X (XhoI); chemicals GGE (guaiacylglycerol-β-guaiacyl ether), GSH (glutathione), GSSG (glutathione disulfide), and asterisks are asymmetric carbons.

[0074] Commercial products that can be obtained from a bioconversion of lignin-derived compounds, as taught herein, include mono-aromatic chemicals. Examples of such chemicals include, but are not limited to, caprolactam, cumene, styrene, mononitro- and dinitrotoluenes and their derivatives, 2,4-diaminotoluene, 2,4-dinitrotoluene, terephthalic acid, catechol, vanillin, salicylic acid, aminosalicylic acid, cresol and isomers, alkylphenols, chlorinated phenols, nitrophenols, polyhydric phenols, nitrobenzene, aniline and secondary and tertiary aniline bases, benzothiazole and derivatives, alkylbenzene and alkylbenzene sulfonates, 4,4-diphenylmethane diisocyanate (MDI), chlorobenzenes and dichlorobenzenes, nitrochlorobenzenes, sulfonic acid derivatives of toluene, pseudocumene, mesitylene, nitrocumene, cumenesulfonic acid.

### Enzyme Discovery

[0075] The teachings herein are also directed to the discovery of novel enzymes. In some embodiments, the enzymes are beta-etherase enzymes.

[0076] Lignin is the only plant biomass constituent based on aromatic core structures, and is comprised of branched phenylpropenyl (C9) units. The guaiacol and syringol building blocks of lignin are linked through carbon-carbon (C—C) and carbon-oxygen (C—O, ether) bonds. The native structure of lignin suggests its key application as a chemical feedstock for aromatic chemicals. The production of such chemical structures necessitates depolymerization and rupture of C—C and C—O bonds. An abundant chemical linkage in lignin is the beta-aryl ether linkage, which comprises 50% to 70% of the bond type in lignin. The efficient scission of the beta-aryl ether bond would generate the monomeric building blocks of lignin, and provide the chemical feedstock for subsequent conversion to a range of industrial products.

[0077] The beta-etherase enzyme system has multiple advantages for conversions of lignin oligomers to monomers over the laccase enzyme systems. The beta-etherase enzyme system would achieve highly selective reductive bond scission catalysis for efficient and high yield conversions of lignin oligomers to monomers without the formation of side products, degradation of the aromatic core structures of lignin, or the use of electron transfer mediators required with use of the oxidative and radical chemistry-based laccase enzyme systems.

[0078] FIG. 3 is an example of a beta-etherase catalyzed hydrolysis of a model lignin dimer, α-O-(β-methylumbelliferyl) acetovanillone (MUAV), according to some embodiments. The scission of the beta-aryl ether bond in model compounds of lignin by beta-etherases from the microbe Sphingmonas paucimobilis has been described. However, the available information is limited, and there is no precedent in the literature for the use of S. paucimobilis as an industrial microbe for commercial scale processes. The discovery of new beta-etherase enzymes, and the heterologous expression of these new enzymes in Azotobacter strains will provide the art with valuable industrial strains that particulary well-suited for lignin conversion processes.

[0079] One of skill will recognize the chemical nomenclature used herein as standard to the art. For example, the amino acids used herein can be identified by at least the following conventional three-letter abbreviations in Table 2:

TABLE 2

| | | | | | |
|---|---|---|---|---|---|
| Alanine | A | Ala | Leucine | L | Leu |
| Arginine | R | Arg | Lysine | K | Lys |
| Asparagine | N | Asn | Methionine | M | Met |
| Aspartic acid | D | Asp | Phenylalanine | F | Phe |
| Cysteine | C | Cys | Proline | P | Pro |
| Glutamic acid | E | Glu | Serine | S | Ser |
| Glutamine | Q | Gln | Threonine | T | Thr |
| Glycine | G | Gly | Tryptophan | W | Trp |
| Histidine | H | His | Tyrosine | Y | Tyr |
| Isoleucine | I | Ile | Valine | V | Val |
| Ornithine | O | Orn | Other | | Xaa |

[0080] The single letter identifier is provided for ease of reference, but any format can be used. The three-letter abbreviations are generally accepted in the peptide art, recommended by the IUPAC-IUB commission in biochemical nomenclature, and are provided to comply with WIPO Standard ST.25. Furthermore, the peptide sequences are taught according to the generally accepted convention of placing the N-terminus on the left and the C-terminus on the right of the sequence listing to again comply with WIPO Standard ST.25.

[0081] The Recombinant Polypeptides

[0082] The teachings herein are based on discovery of novel and non-obvious proteins, DNAs, and host cell systems that can function in the conversion of lignin-derived compounds into valuable aromatic compounds. The systems can include natural, wild-type components or recombinant components, the recombinant components being isolatable from what occurs in nature.

[0083] The term “isolated” means altered “by the hand of man” from its natural state; i.e., if it occurs in nature, it has been changed or removed from its original environment, or both. For example, a naturally occurring polynucleotide or a polypeptide naturally present in a living animal in its natural state is not “isolated,” but the same polynucleotide or polypeptide separated from the coexisting materials of its natural state is “isolated”, as the term is used herein. For example, with respect to polynucleotides, the term isolated means that it is separated from the chromosome and cell in which it naturally occurs. However, a nucleic acid molecule contained in a clone that is a member of a mixed clone library (e.g., a genomic or cDNA library) and that has not been isolated from other clones of the library (e.g., in the form of a homogeneous solution containing the clone without other members of the library) or a chromosome isolated or removed from a cell or a cell lysate (e.g., a “chromosome spread”, as in a karyotype), is not “isolated” for the purposes of the teachings herein. Moreover, a lone nucleic acid molecule contained in a preparation of mechanically or enzymatically cleaved genomic DNA, where the isolation of the nucleic molecule was not the goal, is also not “isolated” for the purposes of the teachings herein. As part of, or following, an intentional isolation, polynucleotides can be joined to other polynucleotides, for mutagenesis, to form fusion proteins, and for propagation or expression in a host, for instance. Isolated polynucleotides, alone or joined to other polynucleotides such as vectors, can be introduced into host cells, in culture or in whole organisms, after which such DNAs still would be isolated, as the term is used herein, because they would not be in their naturally occurring form or environment. Similarly, the isolated polynucleotides and polypeptides may occur in a composition, such as a media formulation, solutions for introduction of polynucleotides or polypeptides, for example, into cells, compositions or solutions for chemical or enzymatic reactions, for instance, which are not naturally occurring compositions, and, therein remain “isolated” polynucleotides or polypeptides within the meaning of that term as it is used herein.

[0084] A “vector,” such as an expression vector, is used to transfer or transmit the DNA of interest into a prokaryotic or eukaryotic host cell, such as a bacteria, yeast, or a higher eukaryotic cell. Vectors can be recombinantly designed to contain a polynucleotide encoding a desired polypeptide. These vectors can include a tag, a cleavage site, or a combination of these elements to facilitate, for example, the process of producing, isolating, and purifying a polypeptide. The DNA of interest can be inserted as the expression component of a vector. Examples of vectors include plasmids, cosmids, viruses, and bacteriophages. If the vector is a virus or bacteriophage, the term vector can include the viral/bacteriophage coat. The term “expression vector” is usually used to describe a DNA construct containing gene encoding an expression product of interest, usually a protein, that is expressed by the machinery of the host cell. This type of vector is frequently a plasmid, but the other forms of expression vectors, such as bacteriophage vectors and viral vectors (e.g., adenoviruses, replication defective retroviruses, and adeno-associated viruses), can be used.

[0085] In some embodiments, the polypeptides taught herein can be natural or wildtype, isolated and/or recombinant. In some embodiments, the polynucleotides can be natural or wildtype, isolated and/or recombinant. In some embodiments, the teachings are directed to a vector than can include such a polynucleotide or a host cell transformed by such a vector.

[0086] In some embodiments, the polypeptide can be an isolated recombinant polypeptide, comprising an amino acid sequence having at least 95% identity to SEQ ID NO:101. The sequence can conserve residues T19, I20, S21, P22, V24, W25, T27, K28, Y29, A30, H33, K34, G35, F36, D39, I40, V41, P42, G43, G44, F45, G47, I48, E50, R51, T52, G53, G54, K100, A101, N104, V111, G112, M115, F116, P166, W107, Y184, Y187, R188, G191, G192, and F195.

[0087] In some embodiments, the polypeptide can be an isolated recombinant polypeptide, comprising SEQ ID NO:101; or conservative substitutions thereof outside of the conserved residues. The conserved residues can include T19, I20, S21, P22, V24, W25, T27, K28, Y29, A30, H33, K34, G35, F36, D39, I40, V41, P42, G43, G44, F45, G47, I48, E50, R51, T52, G53, G54; K100, A101, N104, V111; G112, M115, F116, P166, W107, Y184, Y187, R188, G191, G192, and F195.

[0088] In some embodiments, the polypeptide can be an isolated recombinant glutathione S-transferase enzyme, comprising an amino acid sequence having at least 95% identity to SEQ ID NO:101. The amino acid sequence can conserve residues T19, I20, S21, P22, V24, W25, T27, K28, Y29, A30, H33, K34, G35, F36, D39, I40, V41, P42, G43, G44, F45, G47, I48, E50, R51, T52, G53, G54; K100, A101, N104, V111, G112, M115, F116, P166, W107, Y184, Y187, R188, G191, G192, and F195; wherein, the amino acid sequence functions to cleave a beta-aryl ether.

[0089] In some embodiments, the polypeptide can be an isolated recombinant glutathione S-transferase enzyme, comprising an amino acid sequence having at least 95% identity to SEQ ID NO:101; wherein, the amino acid sequence functions to cleave a beta-aryl ether.

[0090] In some embodiments, the polypeptide can be an isolated recombinant polypeptide, comprising (i) a length ranging from about 279 to about 281 amino acids; (ii) a first amino acid region consisting of residues 19-54 from SEQ ID NO:101, or conservative substitutions thereof outside of conserved residues T19, I20, S21, P22, V24, W25, T27, K28, Y29, A30, H33, K34, G35, F36, D39, I40, V41, P42, G43, G44, F45, G47, I48, E50, R51, T52, G53, and G54; wherein, the first amino acid region can be located in the recombinant polypeptide from about residue 14 to about residue 59; and, (iii) a second amino acid region consisting of residues 98-221 from SEQ ID NO:101, or conservative substitutions thereof outside of conserved residues K100, A101, N104, V111, G112, M115, F116, P166, W107, Y184, Y187, R188, G191, G192, and F195; wherein, the second amino acid region is located in the recombinant polypeptide from about residue 93 to about residue 226.

[0091] In some embodiments, the polypeptide can be an isolated recombinant glutathione S-transferase enzyme, comprising (i) a length ranging from about 279 to about 281 amino acids; (ii) a first amino acid region having at least 95% identity to residues 19-54 from SEQ ID NO:101 while conserving residues T19, I20, S21, P22, V24, W25, T27, K28, Y29, A30, H33, K34, G35, F36, D39, I40, V41, P42, G43, G44, F45, G47, I48, E50, R51, T52, G53, and G54; wherein, the first amino acid region is located in the recombinant polypeptide from about residue 14 to about residue 59; and, (iii) a second amino acid region having at least 95% identity to residues 98-221 from SEQ ID NO:101 while conserving residues K100, A101, N104, V111, G112, M115, F116, P166, W107, Y184, Y187, R188, G191, G192, and F195; wherein, the second amino acid region can be located in the recombinant polypeptide from about residue 93 to about residue 226; and, the recombinant glutathione S-transferase enzyme can function to cleave a beta-aryl ether.

[0092] In some embodiments, the polypeptide can be an isolated recombinant glutathione S-transferase enzyme, comprising an amino acid sequence having at least 95% identity to SEQ ID NO:541; wherein, the amino acid sequence functions to cleave a beta-aryl ether.

[0093] In some embodiments, the polypeptide can be an isolated recombinant polypeptide, comprising (i) a length ranging from about 256 to about 260 amino acids; (ii) a first amino acid region consisting of residues 47-57 from SEQ ID NO:541, or conservative substitutions thereof outside of conserved residues A47, I48, N49, P50, G52, V54, P55, V56, L57; wherein, the first amino acid region is located in the recombinant polypeptide from about residue 45 to about residue 57; (iii) a second amino acid region consisting of 63-76 from SEQ ID NO:541; and, (iv) a third amino acid region consisting of residues 99-230 from SEQ ID NO:541, or conservative substitutions thereof outside of conserved residues R100, Y101, K104, D107, M111, N112, S115, M116, K176, L194, I197, N198, S201, H202, and M206; wherein, the second amino acid region is located in the recombinant polypeptide from about residue 94 to about residue 235.

[0094] In some embodiments, the polypeptide can be an isolated recombinant glutathione S-transferase enzyme, comprising (i) a length ranging from about 279 to about 281 amino acids; (ii) a first amino acid region having at least 95% identity to 47-57 from SEQ ID NO:541, or conservative substitutions thereof outside of conserved residues A47, I48, N49, P50, G52, V54, P55, V56, L57; wherein, the first amino acid region can be located in the recombinant polypeptide from about residue 45 to about residue 57; (iii) a second amino acid region consisting of 63-76 from SEQ ID NO:541; and, (iv) a third amino acid region having at least 95% identity to residues 99-230 from SEQ ID NO:541, or conservative substitutions thereof outside of conserved residues R100, Y101, K104, D107, M111, N112, S115, M116, K176, L194, I197, N198, S201, H202, and M206; wherein, the second amino acid region can be located in the recombinant polypeptide from about residue 94 to about residue 235; wherein, the recombinant glutathione S-transferase enzyme functions to cleave a beta-aryl ether.

[0095] In some embodiments, an amino acid substitution outside of the conserved residues can be a conservative substitution. And, in many embodiments, the amino acid sequence can function to cleave a beta-aryl ether.

### Methods of Preparing the Recombinant SDF-1 Polynucleotide and Polypeptides

[0096] The teachings include a method of preparing the polypeptides described herein, comprising culturing a host cell under conditions suitable to produce the desired polypeptide; and recovering the polypeptide from the host cell culture; wherein, the host cell comprises an exogenously-derived polynucleotide encoding the desired polypeptide. In some embodiments, the host cell is E. Coli. In some embodiments, the host cell can be an Azotobacter strain such as, for example, Azotobacter vinelandii.

[0097] Initially, a double-stranded DNA fragment encoding the primary amino acid sequence of recombinant polypeptide can be designed. This DNA fragment can be manipulated to facilitate synthesis, cloning, expression or biochemical manipulation of the expression products. The synthetic gene can be ligated to a suitable cloning vector and then the nucleotide sequence of the cloned gene can be determined and confirmed. The gene can be then amplified using designed primers having specific restriction enzyme sequences introduced at both sides of insert gene, and the gene can be subcloned into a suitable subclone/expression vector. The expression vector bearing the synthetic gene for the mutant can be inserted into a suitable expression host. Thereafter the expression host can be maintained under conditions suitable for production of the gene product and, in some embodiments, the protein can be (i) isolated and purified from the cells expressing the gene or (ii) used directly in a reaction environment that includes the host cell.

[0098] The nucleic acid (e.g., cDNA or genomic DNA) may be inserted into a replicable vector for cloning (amplification of the DNA) for expression. Various vectors are publicly available. In general, DNA can be inserted into an appropriate restriction endonuclease site(s) using techniques known in the art, for example. Vector components generally include, but are not limited to, one or more of a signal sequence, an origin of replication, one or more marker genes, an enhancer element, a promoter, and a transcription termination sequence.

[0099] The signal sequence may be a prokaryotic signal sequence selected, for example, from the group of the alkaline phosphatase, penicillinase, Ipp, or heat-stable enterotoxin II leaders. For yeast secretion the signal sequence may be, e.g., the yeast invertase leader, alpha factor leader (including Saccharomyces and Kluyveromyces alpha-factor leaders, the latter described in U.S. Pat. No. 5,010,182), or acid phosphatase leader, the C. albicans glucoamylase leader (EP 362,179), or the signal described in WO 90/13646, for example. In mammalian cell expression, mammalian signal sequences may be used to direct secretion of the protein, such as signal sequences from secreted polypeptides of the same or related species, as well as viral secretory leaders.

[0100] Both expression and cloning vectors contain a nucleic acid sequence that enables the vector to replicate in one or more selected host cells. Such sequences are well known for a variety of bacteria, yeast, and viruses. The origin of replication from a plasmid, e.g. pBR322, for example, is suitable for most Gram-negative bacteria, and the 2μ plasmid origin is suitable for yeast, and various viral origins (SV40, polyoma, adenovirus, VSV or BPV) are useful for cloning vectors in mammalian cells.

[0101] Expression and cloning vectors will typically contain a selection gene, also termed a selectable marker. Typical selection genes encode proteins that (a) confer resistance to antibiotics or other toxins, e.g., ampicillin, neomycin, methotrexate, or tetracycline, (b) complement auxotrophic deficiencies, or (c) supply critical nutrients not available from complex media, e.g., the gene encoding D-alanine racemase for Bacilli.

[0102] An example of suitable selectable markers for mammalian cells are those that enable the identification of cells competent to take the encoding nucleic acid, such as DHFR or thymidine kinase. An appropriate host cell when wild-type DHFR is employed is the CHO cell line deficient in DHFR activity, prepared and propagated as described by Urlaub et al., Proc. Natl. Acad. Sci. USA, 77:4216 (1980). A suitable selection gene for use in yeast is the trp1 gene present in the yeast plasmid YRp7 (Stinchcomb et al., Nature, 282:39 (1979); Kingsman et al., Gene, 7:141 (1979); Tschemper et al., Gene, 10:157 (1980)). The trpl gene provides a selection marker for a mutant strain of yeast lacking the ability to grow in tryptophan, for example, ATCC No. 44076 or PEP4-1 (Jones, Genetics, 85:12 (1977)).

[0103] Expression and cloning vectors usually contain a promoter operably linked to the encoding nucleic acid sequence to direct mRNA synthesis. Promoters recognized by a variety of potential host cells are well known. Promoters suitable for use with prokaryotic hosts include the .beta.-lactamase and lactose promoter systems (Chang et al., Nature, 275:615 (1978); Goeddel et al., Nature, 281:544 (1979)), alkaline phosphatase, a tryptophan (trp) promoter system (Goeddel, Nucleic Acids Res., 8:4057 (1980); EP 36,776), and hybrid promoters such as the tac promoter (deBoer et al., Proc. Natl. Acad. Sci. USA, 80:21 25 (1983)). Promoters for use in bacterial systems also will contain a Shine-Dalgarno sequence operably linked to the encoding DNA.

[0104] Other yeast promoters, which are inducible promoters having the additional advantage of transcription controlled by growth conditions, are the promoter regions for alcohol dehydrogenase 2, isocytochrome C, acid phosphatase, degradative enzymes associated with nitrogen metabolism, metallothionein, glyceraldehyde-3-phosphate dehydrogenase, and enzymes responsible for maltose and galactose utilization. Suitable vectors and promoters for use in yeast expression are known in the art, e.g. see EP 73,657 for a further discussion.

[0105] PRO87299 transcription from vectors in mammalian host cells is controlled, for example, by promoters obtained from the genomes of viruses such as polyoma virus, fowlpox virus (UK 2,211,504), adenovirus (such as Adenovirus 2), bovine papilloma virus, avian sarcoma virus, cytomegalovirus, a retrovirus, hepatitis-B virus and Simian Virus 40 (SV40), from heterologous mammalian promoters, e.g., the actin promoter or an immunoglobulin promoter, and from heat-shock promoters, provided such promoters are compatible with the host cell systems.

[0106] Transcription of the encoding DNA by higher eukaryotes may be increased by inserting an enhancer sequence into the vector. Enhancers are cis-acting elements of DNA, usually about from 10 to 300 bp, that act on a promoter to increase its transcription. Many enhancer sequences are now known from mammalian genes (globin, elastase, albumin, a-fetoprotein, and insulin). Typically, however, one will use an enhancer from a eukaryotic cell virus. Examples include the SV40 enhancer on the late side of the replication origin, the cytomegalovirus early promoter enhancer, the polyoma enhancer on the late side of the replication origin, and adenovirus enhancers. The enhancer may be spliced into the vector at a position 5′ or 3′ to the coding sequence but is preferably located at a site 5′ from the promoter.

[0107] Expression vectors used in eukaryotic host cells (yeast, fungi, insect, plant, animal, human, or nucleated cells from other multicellular organisms) will also contain sequences necessary for the termination of transcription and for stabilizing the mRNA. Such sequences are commonly available from the 5′ and, occasionally 3′, untranslated regions of eukaryotic or viral DNAs or cDNAs. These regions contain nucleotide segments transcribed as polyadenylated fragments in the untranslated portion of the mRNA encoding the mutants.

[0108] In some embodiments, the expression control sequence can be selected from a group consisting of a lac system, T7 expression system, major operator and promoter regions of pBR322 origin, and other prokaryotic control regions. Still other methods, vectors, and host cells suitable for adaptation to the synthesis of the mutants in recombinant vertebrate cell culture are described in Gething et al., Nature, 293:620 625 (1981); Mantei et al., Nature, 281:40 46 (1979); EP 117,060; and EP 117,058.

[0109] Mutants can be expressed as a fusion protein. In some embodiments, the methods involve adding a number of amino acids to the protein, and in some embodiments, to the amino terminus of the protein. Extra amino acids can serve as affinity tags or cleavage sites, for example. Fusion proteins can be designed to: (1) assist in purification by acting as a temporary ligand for affinity purification, (2) produce a precise recombinant by removing extra amino acids using a cleavage site between the target gene and affinity tag, (3) increase the solubility of the product, and/or (4) increase expression of the product. A proteolytic cleavage site can be included at the junction of the fusion region and the protein of interest to enable further purification of the product—separation of the recombinant protein from the fusion protein following affinity purification of the fusion protein. Such enzymes, and their cognate recognition sequences, can include Factor Xa, thrombin and enterokinase, cyanogen bromide, trypsin, or chymotrypsin, for example. Typical fusion expression vectors include pGEX (Pharmacia Biotech Inc; Smith, D. B. and Johnson, K. S. Gene 67:31-40 (1988)), pMAL (New England Biolabs, Beverly, Mass.), pRIT5 (Pharmacia, Piscataway, N.J.), and pET (Strategen), which can fuse glutathione S-transferase (GST), maltose E binding protein, protein A, or a six-histidine sequence, respectively, to a target recombinant protein.

[0110] Synthetic DNAs containing the sequences of nucleotides, tags and cleavage sites can be designed and provided as a modified coding for recombinant polypeptide mutants. In some embodiments, a polypeptide can be a fusion polypeptide having an affinity tag, and the recovering step includes (1) capturing and purifying the fusion polypeptide, and (2) removing the affinity tag for high yield production of the desired polypeptide or an amino acid sequence that is at least 95% homologous to a desired polypeptide. DNA encoding the mutants may be obtained from a cDNA library prepared from tissue possessing the mRNA for the mutants. As such, the DNA can be conveniently obtained from a cDNA library. The encoding gene for the mutants may also be obtained from a genomic library or by known synthetic procedures (e.g., automated nucleic acid synthesis).

[0111] Libraries can be screened with probes designed to identify the gene of interest or the protein encoded by it. Screening the cDNA or genomic library with the selected probe may be conducted using standard hybridization procedures, such as described in Sambrook et al., Molecular Cloning: A Laboratory Manual (New York: Cold Spring Harbor Laboratory Press, 1989), which is herein incorporated by reference. An alternative means to isolate the gene encoding recombinant polypeptide mutants is to use PCR methodology [Sambrook et al., supra; Dieffenbach et al., PCR Primer: A Laboratory Manual (Cold Spring Harbor Laboratory Press, 1995)].

[0112] Nucleic acids having a desired protein coding sequence may be obtained by screening selected cDNA or genomic libraries using a deduced amino acid sequence and, if necessary, a conventional primer extension procedure as described in Sambrook et al., supra, to detect precursors and processing intermediates of mRNA that may not have been reverse-transcribed into cDNA.

[0113] The selection of expression vectors, control sequences, transformation methods, and the like, are dependent on the type of host cell used to express the gene. Following entry into a cell, all or part of the vector DNA, including the insert DNA, may be incorporated into the host cell chromosome, or the vector may be maintained extrachromosomally. Those vectors that are maintained extrachromosomally are frequently capable of autonomous replication in the host cell. Other vectors are integrated into the genome of a host cell upon and are replicated along with the host genome.

[0114] Host cells are transfected or transformed with the expression or cloning vectors described herein to produce the mutants. The cells are cultured in conventional nutrient media modified as appropriate for inducing promoters, selecting transformants, or amplifying the genes encoding the desired sequences. The culture conditions, such as media, temperature, pH and the like, can be selected by the skilled artisan without undue experimentation. In general, principles, protocols, and practical techniques for maximizing the productivity of cell cultures can be found in Mammalian Cell Biotechnology: a Practical Approach, M. Butler, ed. (IRL Press, 1991) and Sambrook et al., supra, each of which are incorporated by reference.

[0115] The host cells can be prokaryotic or eukaryotic and, suitable host cells for cloning or expressing the DNA in the vectors herein can include prokaryote, yeast, or higher eukaryote cells. Methods of eukaryotic cell transfection and prokaryotic cell transformation are known to the ordinarily skilled artisan, for example, CaCl2, CaPO4, liposome-mediated and electroporation. Depending on the host cell used, transformation is performed using standard techniques appropriate to such cells. The calcium treatment employing calcium chloride, as described in Sambrook et al., supra, or electroporation is generally used for prokaryotes. Infection with Agrobacterium tumefaciens is used for transformation of certain plant cells, as described by Shaw et al., Gene, 23:315 (1983) and WO 89/05859 published 29 Jun. 1989. For mammalian cells without such cell walls, the calcium phosphate precipitation method of Graham and van der Eb, Virology, 52:456 457 (1978) can be employed. General aspects of mammalian cell host system transfections have been described in U.S. Pat. No. 4,399,216. Transformations into yeast are typically carried out according to the method of Van Solingen et al., J. Bact., 130:946 (1977) and Hsiao et al., Proc. Natl. Acad. Sci. (USA), 76:3829 (1979). However, other methods for introducing DNA into cells, such as by nuclear microinjection, electroporation, bacterial protoplast fusion with intact cells, or polycations, e.g., polybrene, polyornithine, may also be used. For various techniques for transforming mammalian cells, see Keown et al., Methods in Enzymology, 185:527 537 (1990) and Mansour et al., Nature, 336:348 352 (1988).

[0116] Suitable host cells for cloning or expressing the DNA in the vectors herein include prokaryote, yeast, or higher eukaryote cells. Suitable prokaryotes include, but are not limited to, eubacteria, such as Gram-negative or Gram-positive organisms, for example, Enterobacteriaceae such as E. coli. Various E. coli strains are publicly available, such as E. coli K12 strain MM294 (ATCC 31,446); E. coli X1776 (ATCC 31,537); E. coli strain W3110 (ATCC 27,325) and K5 772 (ATCC 53,635). Other suitable prokaryotic host cells include Enterobacteriaceae such as Escherichia, e.g., E. coli, Enterobacter, Erwinia, Klebsiella, Proteus, Salinonella, e.g., Salmonella typhimunrium, Serratia, e.g., Serratia marcescans, and Shigella, as well as Bacilli such as B. subtilis and B. licheniformis (e.g., B. licheniformis 41P disclosed in DD 266,710 published 12 Apr. 1989), Pseudomonas such as P. aeruginosa, and Streptomyces. These examples are illustrative rather than limiting, and merely supplement the remainder of the teachings herein. Strain W3110 is one particularly preferred host or parent host because it is a common host strain for recombinant DNA product fermentations. Preferably, the host cell secretes minimal amounts of proteolytic enzymes. For example, strain W3110 may be modified to effect a genetic mutation in the genes encoding proteins endogenous to the host, with examples of such hosts including E. coli W3110 strain 1 A2, which has the complete genotype tonA; E. coli W3110 strain 9E4, which has the complete genotype tonA ptr3; E. coli W3110 strain 27C7 (ATCC 55,244), which has the complete genotype tonA ptr3 phoA E15 (argF-lac) 169 degP ompT kanr; E. coli W3110 strain 37D6, which has the complete genotype tonA ptr3 phoA E15 (argF-lac) 169 degP ompT rbs7 ilvC kanr; E. coli W3110 strain 40B4, which is 37D6 with a non-kanamycin resistant degP deletion mutation; and an E. coli strain having mutant periplasmic protease as disclosed in U.S. Pat. No. 4,946,783. Alternatively, in vitro methods of cloning, e.g., PCR or other nucleic acid polymerase reactions, are suitable.

[0117] In addition to prokaryotes, eukaryotic microbes such as filamentous fungi or yeast are suitable cloning or expression hosts for the mutants. Saccharomyces cerevisiae is a commonly used lower eukaryotic host microorganism. Others include Schizosaccharomyces pombe (Beach and Nurse, Nature, 290: 140 (1981); EP 139,383 published 2 May 1985); Kluyveromyces hosts (U.S. Pat. No. 4,943,529; Fleer et al., Bio/Technology, 9:968 975 (1991)) such as, e.g., K. lactis (MW98-8C, CBS683, CBS4574; Louvencourt et al., J. Bacterial., 154(2):737 742 (1983)), K. fragilis (ATCC 12,424), K. bulgaricus (ATCC 16,045), K. wickeramii (ATCC 24,178), K. waltii (ATCC 56,500), K. drosophilarum (ATCC 36,906; Van den Berg et al., Bic)/Technology, 8:135 (1990)), K. thermotolerans, and K. marxianus; yarrowia (EP 402,226); Pichia pastoris (EP 183,070; Sreekrishna et al., J. Basic Microbial., 28:265 278 [1988]); Candida; Trichoderma reesia (EP 244,234); Neurospora crassa (Case et al., Proc. Natl. Acad. Sci. USA, 76:5259 5263 (1979)); Schwanniomyces such as Schwanniomyces occidentalis (EP 394,538); and filamentous fungi such as, e.g., Neurospora, Penicillium, Tolypocladium (WO 91/00357), and Aspergillus hosts such as A. nidulans (Ballance et al., Biochem. Biophys. Res. Commun., 112:284 289 (1983); Tilburn et al., Gene, 26:205 221 (1983); Yelton et al., Proc. Natl. Acad. Sci. USA, 81: 1470 1474 (1984)) and A. niger (Kelly and Hynes, EMBO J., 4:475 479 (1985)) Methylotropic yeasts are suitable herein and include, but are not limited to, yeast capable of growth on methanol selected from the genera consisting of Hansenula, Candida, Kloeckera, Pichia, Saccharomyces, Torulopsis, and Rhodotorula. A list of specific species that are exemplary of this class of yeasts may be found in C. Anthony, The Biochemistry of Methylotrophs, 269 (1982).

[0118] Suitable host cells for the expression of glycosylated mutants can be derived from multicellular organisms. Invertebrate cells include insect cells such as Drosophila S2 and Spodoptera Sf9, as well as plant cells. Useful mammalian host cell lines include Chinese hamster ovary (CHO) and COS cells. More specific examples include monkey kidney CV1 line transformed by SV40 (COS-7, ATCC CRL 1651); human embryonic kidney line (293 or 293 cells subcloned for growth in suspension culture, Graham et al., J. Gen Viral., 36:59 (1977)); Chinese hamster ovary cells/−DHFR (CHO, Urlaub and Chasin, Proc. Natl. Acad. Sci. USA, 77:4216 (1980)); mouse sertoli cells (TM4, Mather, Biol. Reprod., 23:243 251 (1980)); human lung cells (W138, ATCC CCL 75); human liver cells (Hep G2, HB 8065); and mouse mammary tumor (MMT 060562, ATCC CCL5 1). One of skill can readily choose the appropriate host cell, at least for extracellular protein harvesting embodiments, without undue experimentation.

[0119] In some embodiments, a nucleotide sequence will be hybridizable, under moderately stringent conditions, to a nucleic acid having a nucleotide sequence comprising or complementary to the desired nucleotide sequences. In some embodiments, an isolated nucleotide sequence will be hybridizable, under stringent conditions, to a nucleic acid having a nucleotide sequence comprising or complementary to the desired nucleotide sequences. A nucleic acid molecule can be “hybridizable” to another nucleic acid molecule when a single-stranded form of the nucleic acid molecule can anneal to the other nucleic acid molecule under the appropriate conditions of temperature and ionic strength (see Sambrook et al., supra,). The conditions of temperature and ionic strength determine the “stringency” of the hybridization. “Hybridization” requires that two nucleic acids contain complementary sequences. However, depending on the stringency of the hybridization, mismatches between bases may occur. The appropriate stringency for hybridizing nucleic acids depends on the length of the nucleic acids and the degree of complementation. Such variables are well known in the art. More specifically, the greater the degree of similarity or homology between two nucleotide sequences, the greater the value of Tm for hybrids of nucleic acids having those sequences. For hybrids of greater than 100 nucleotides in length, equations for calculating Tm have been derived (see Sambrook et al., supra). For hybridization with shorter nucleic acids, the position of mismatches becomes more important, and the length of the oligonucleotide determines its specificity (see Sambrook et al., supra).

[0120] In some embodiments, the polynucleotides and polypeptides have at least 55, 60, 65, 70, 75, 80, 85, 90, 91, 92, 93, 94, 95, 96, 97, 98, or 99 percent homology to a desired polynucleotide or polypeptide. In some embodiments, the polynucleotides and polypeptides have at least 55, 60, 65, 70, 75, 80, 85, 90, 91, 92, 93, 94, 95, 96, 97, 98, or 99 percent identity to a desired polynucleotide or polypeptide. And, in some embodiments, the polynucleotides and polypeptides have at least 55, 60, 65, 70, 75, 80, 85, 90, 91, 92, 93, 94, 95, 96, 97, 98, or 99 percent similarity to a desired polynucleotide or polypeptide. As described above, degenerate forms of the desired polynucleotide are also acceptable. In some embodiments, a polypeptide can be 90, 91, 92, 93, 94, 95, 96, 97, 98, or 99 homologous, identical, or similar to a desired polypeptide as long as it shares the same function as the desired polypeptide, and the extent of the function can be less or more than that of the desired polypeptide. In some embodiments, for example, a polypeptide can have a function that is 10%, 20%, 30%, 40%, 50%, 60%, 70%, 80%, 90%, 100%, or any 0.1% increment in-between, that of the desired polypeptide. And, in some embodiments, for example, a polypeptide can have a function that is 110%, 120%, 130%, 140%, 150%, 160%, 170%, 180%, 190%, 200%, 300%, 400%, 500%, or more, or any 1% increment in-between, that of the desired polypeptide. In some embodiments the “function” is an enzymatic activity, measurable by any method known to one of skill such as, for example, a method used in the teachings herein. The “desired polypeptide” or “desired polynucleotide” can be referred to as a “reference polypeptide” or “reference polynucleotide”, or the like, in some embodiments as a control for comparison of a polypeptide of interest, which may be considered a “test polypeptide” or “test polynucleotide” or the like. In any event, the comparison is that of one set of bases or amino acids against another set for purposes of measuring homology, identity, or similarity. The ability to hybridize is, of course, another way of comparing nucleotide sequences.

[0121] The terms “homology” and “homologous” can be used interchangeably in some embodiments. The terms can refer to nucleic acid sequence matching and the degree to which changes in the nucleotide bases between polynucleotide sequences affects the gene expression. These terms also refer to modifications, such as deletion or insertion of one or more nucleotides, and the effects of those modifications on the functional properties of the resulting polynucleotide relative to the unmodified polynucleotide. Likewise the terms refer to polypeptide sequence matching and the degree to which changes in the polypeptide sequences, such as those seen when comparing the modified polypeptides to the unmodified polypeptide, affect the function of the polypeptide. It should appreciated to one of skill that the polypeptides, such as the mutants taught herein, can be produced from two non-homologous polynucleotide sequences within the limits of degeneracy.

[0122] The terms “similarity” and “identity” are known in the art. The term “identity” can be used to refer to a sequence comparison based on identical matches between correspondingly identical positions in the sequences being compared. The term “similarity” can be used to refer to a comparison between amino acid sequences, and takes into account not only identical amino acids in corresponding positions, but also functionally similar amino acids in corresponding positions. Thus similarity between polypeptide sequences indicates functional similarity, in addition to sequence similarity. Levels of identity between gene sequences and levels of identity or similarity between amino acid sequences can be calculated using known methods. For example, publicly available computer based methods for determining identity and similarity include the BLASTP, BLASTN and FASTA (Atschul et al., J. Molec. Biol., 1990; 215:403-410), the BLASTX program available from NCBI, and the Gap program from Genetics Computer Group, Madison Wis. In some embodiments, the Gap program, with a Gap penalty of 12 and a Gap length penalty of 4 can be used for determining the amino acid sequence comparisons, and a Gap penalty of 50 and a Gap length penalty of 3 for the polynucleotide sequence comparisons. In some embodiments, the sequences can be aligned so that the highest order match is obtained. The match can be calculated using published techniques that include, for example, Computational Molecular Biology, Lesk, A. M., ed., Oxford University Press, New York, 1988; Biocomputing: Informatics and Genome Projects, Smith, D. W., ed., Academic Press, New York, 1993; Computer Analysis of Sequence Data, Part I, Griffin, A. M., and Griffin, H. G., eds., Humana Press, New Jersey, 1994; Sequence Analysis in Molecular Biology, von Heinje, G., Academic Press, 1987; and Sequence Analysis Primer, Gribskov, M. and Devereux, J., eds., M Stockton Press, New York, 1991, each of which is incorporated by reference herein.

[0123] As such, the term “similarity” is similar to “identity”, but in contrast to identity, similarity can be used to refer to both identical matches and conservative substitution matches. For example, if two polypeptide sequences have 10/20 identical amino acids, and the remainder are all non-conservative substitutions, then the percent identity and similarity would both be 50%. On the other hand, if there are 5 five more positions where there are conservative substitutions, then the percent identity is 50%, whereas the percent similarity is 75%.

[0124] In some embodiments, the term “substantial sequence identity” can refer to an optimal alignment, such as by the programs GAP or BESTFIT using default gap penalties, having at least 65, 70, 75, 80, 85, 90, 95, 96, 97, 98, or 99 percent sequence identity. The difference in what is “substantial” regarding identity can often vary according to a corresponding percent similarity, since the factor of primary importance is often the function of the sequence in a system. The term “substantial percent identity” can be used to refer to a DNA sequence that is sufficiently similar to a reference sequence at the nucleotide level to code for the same protein, or a protein having substantially the same function, in which the comparison can allow for allelic differences in the coding region. Likewise, the term can be used to refer to a comparison of sequences of two polypeptides optimally aligned.

[0125] In some embodiments, sequence comparisons can be made to a reference sequence over a “comparison window” of amino acids or bases that includes any number of amino acids or bases that is useful in the particular comparison. For example, the reference sequence may be a subset of a larger sequence. In some embodiments, the comparison window can include at least 10 residue or base positions, and sometimes at least 15-20 amino acids or bases. The reference or test sequence may represent, for example, a polypeptide or polynucleotide having one or more deletions, substitutions or additions.

[0126] The term “variant” refers to modifications to a peptide that allows the peptide to retain its binding properties, and such modifications include, but are not limited to, conservative substitutions in which one or more amino acids are substituted for other amino acids; deletion or addition of amino acids that have minimal influence on the binding properties or secondary structure; conjugation of a linker; post-translational modifications such as, for example, the addition of functional groups. Examples of such post-translational modifications can include, but are not limited to, the addition of modifying groups described below through processes such as, for example, glycosylation, acetylation, phosphorylation, modifications with fatty acids, formation of disulfide bonds between peptides, biotinylation, PEGylation, and combinations thereof. In fact, in most embodiments, the polypeptides can be modified with any of the various modifying groups known to one of skill.

[0127] The terms “conservatively modified variant,” “conservatively modified substitution,” and “conservative substitution” can be used interchangeably in some embodiments. These terms can be used to refer to a conservative amino acid substitution, which is an amino acid substituted by an amino acid of similar charge density, hydrophilicity/hydrophobicity, size, and/or configuration such as, for example, substituting valine for isoleucine. In comparison, a “non-conservatively modified variant” refers to a non-conservative amino acid substitution, which is an amino acid substituted by an amino acid of differing charge density, hydrophilicity/hydrophobicity, size, and/or configuration such as, for example, substituting valine for phenyalanine. One of skill will appreciate that there are a plurality of ways to define conservative substitutions, and any of these methods may be used with the teachings provided herein. In some embodiments, for example, a substitution can be considered conservative if an amino acid falling into one of the following groups is substituted by an amino acid falling in the same group: hydrophilic (Ala, Pro, Gly, Glu, Asp, Gln, Asn, Ser, Thr), aliphatic (Val, Ile, Leu, Met), basic (Lys, Arg, H is), aromatic (Phe, Tyr, Trp), and sulphydryl (Cys). See Dayhoff, M O. Et al. National Biomedical Research Foundation, Georgetown University, Washington D.C.: 89-99 (1972), which is incorporated herein. In some embodiments, the substitution of amino acids can be considered conservative where the side chain of the substitution has similar biochemical properties to the side chain of the substituted amino acid.

### Microbial Systems—Antimicrobial Lignin-Derived Compounds

[0128] The antimicrobial activity of lignin-derived compounds is a major problem addressed by the systems taught herein. For example, typical industrial fermentation processes might utilize the microbes Escherichia coli K12 or Escherichia coli B, or the yeast Saccharomyces cerevisiae, and recombinant versions of these microbes, which are well characterized industrial strains. The problem is that the antimicrobial activities of aromatic compounds on such industrial microbes are toxic to the microbes, which negates an application to biotransformations of lignin-derived compounds.

[0129] The phenolic streams or soluble lignin streams derived from pretreated lignocellulosic biomass, for example, might contain aromatic and nonaromatic compounds, such as gallic acid, hydroxymethylfurfural alcohol, hydroxymethylfurfural, furfural alcohol, 3,5-dihydroxybenzoate, furoic acid, 3,4-dihydroxybenzaldehyde, hydroxybenzoate, homovanillin, syringic acid, vanillin, and syringaldehyde. There are several lignin-derived compounds that are antimicrobials. For example, furfural, 4-hydroxybenzaldehyde, syringaldehyde, 5-hydroxymethylfurfural, and vanillin are each known to have antimicrobial activity against Escherichia coli, and might have an additive antimicrobial activity against Escherichia coli when present in combination. Moreover, veratraldehyde, cinnamic acid and the respective benzoic acid derivatives of vanillic acid, vanillylacetone, and the cinnamic acid derivatives o-coumaric acid, m-coumaric acid, and p-coumaric acid might be components of the phenolic streams from pretreated lignocellulosic biomass. Veratraldehyde, cinnamic acid and the respective benzoic acid derivatives of vanillic acid, vanillylacetone, and cinnamic acid derivatives o-coumaric acid, m-coumaric acid, and p-coumaric acid, each have significant antifungal activities against the yeast Saccharomyces cerevisiae, and might have an additive antifungal activity against the yeast Saccharomyces cerevisiae when present, in combination.

[0130] One or more of the following benzaldehyde derivatives might be present in the phenolic streams from pretreated lignocellulosic biomass: 2,4,6-trihydroxybenzaldehyde, 2,5-dihydroxybenzaldehyde, 2,3,4-trihydroxybenzaldehyde, 2-hydroxy-5-methoxybenzaldehyde, 2,3-dihydroxybenzaldehyde, 2-hydroxy-3-methoxybenzaldehyde, 4-hydroxy-2,6-dimethoxybenzaldehyde, 2,5-dihydroxybenzaldehyde, 2,4-dihydroxybenzaldehyde, and 2-hydroxybenzaldehyde. Likewise, 2,4,6-trihydroxybenzaldehyde, 2,5-dihydroxybenzaldehyde, 2,3,4-trihydroxybenzaldehyde, 2-hydroxy-5-methoxybenzaldehyde, 2,3-dihydroxybenzaldehyde, 2-hydroxy-3-methoxybenzaldehyde, 4-hydroxy-2,6-dimethoxybenzaldehyde, 2,5-dihydroxybenzaldehyde, 2,4-dihydroxybenzaldehyde, and 2-hydroxybenzaldehyde have each demonstrated antibacterial activity against Escherichia coli, and might have an additive antibacterial activity against Escherichia coli when present in combination.

### Microbial Systems—Suitable Microbes

[0131] The antimicrobial activity of lignin-derived compounds creates a need for a strain of microbe that is tolerant to such activity in the reaction environment. The teachings include the identification of recombinant or non-recombinant microbial species that are naturally capable of metabolizing aromatic compounds for the biotransformations of lignin-derived compounds to commercial products.

[0132] Some examples of microbial species particularly suited for biotransformations of phenolic streams from pretreated lignocellulosic biomass include, but are not limited to, Azotobacter chroococcum, Azotobacter vinelandii, Novosphingobium aromaticivorans, Pseudomonas aeruginosa, Pseudomonas putida, Pseudomonas fluorescens, Pseudomonas stutzerii, Pseudomonas diminuta, Pseudomonas pseudoalcaligenes, Rhodopseudomonas palustris, Spingomonas sp.A1, Sphingomonas paucimobilis SYK-6, Sphingomonas japonicum, Sphingomonas alaskenesis, Sphingomonas wittichii, Streptomyces viridosporus, Delftia acidivorans, and Rhodococcus equi. Both bio-informatic and experimental data from the literature reveal the presence of extensive metabolic activity towards aromatic compounds in these strains, making them relevant species for the discovery of enzymes that hydrolyze lignin-derived oligomers, and for biotransformations of lignin core structures. Without intending to be bound by any theory or mechanism of action, these species exhibit, for example, metabolism of aromatic compounds such as benzoate; amino-, fluoro-, and chloro-benzoates; biphenyl; toluene and nitrotoluenes; xylenes; alkylbenzenes; styrene; atrazine; caprolactam; and polycyclic aromatic hydrocarbons.

[0133] The microbes can be grown in a fermentor, for example, using methods known to one of skill. The enzymes used in the bioprocessing are obtained from the microbes, and they can be intracellular, extracellular, or a combination thereof. As such, the enzymes can be recovered from the host cells using methods known to one of skill in the art that include, for example, filtering or centrifuging, evaporation, and purification. In some embodiments, the method can include breaking open the host cells using ultrasound or a mechanical device, remove debris and extract the protein, after which the protein can be purified using, for example, electrophoresis. In some embodiments, however, the teachings include the use of a microbe, recombinant or non-recombinant, that has tolerance to lignin-derived compounds. A microbe that is tolerant to lignin-derived compounds can be used industrially, for example, to express any enzyme, recombinant or non-recombinant, having a desired enzyme activity while directly in association with the lignin-derived compounds. Such activities include, for example, beta etherase activity, C-alpha-dehydrogenase activity, glutathione lyase activity, or any other enzyme activity that would be useful in the biotransformation of lignin-derived compounds. The activities can be wild-type or produce through methods known to one of skill, such as transfection or transformation, for example.

### Microbial Systems—Azotobacter Strains

[0134] The teachings herein are also directed to the discovery and use of recombinant Azotobacter strains heterologously expressing novel beta-etherase enzymes for the hydrolysis of lignin oligomers.

[0135] Research directed to the discovery of a suitable microbe has shown that Azotobacter vinelandii may possess the industrially relevant strain criteria desired for the teachings provided herein. In some embodiments, the criteria includes (i) growth on inexpensive and defined medium, (ii) resistance to inhibitors in hydrolysates of lignocellulose, (iii) tolerance to acidic pH and higher temperatures, (iv) the co-fermentation of pentose and hexose sugars, (v) genetic tractability and availability of gene expression tools, (vi) rapid generation times, and (vii) successful growth performance in pilot scale fermentations. Additionally, key physiological traits that contribute to the potential suitability of A. vinelandii to the conversion of lignin-streams include an ability to metabolize aromatic compounds and xenobiotics. Moreover, it has been shown to have a tolerance to phenolic compounds in industrial waste streams. The annotated genome sequence of A. vinelandii, and the availability of genetic tools for its transformation and for the heterologous expression of enzymes, contribute to the potential of this microbe to function, in it's native form or as a transformant, for example, in a high-yield production of industrial chemicals from lignin streams.

[0136] The teachings are also directed to a method of cleaving a beta-aryl ether bond, the comprising contacting a polypeptide taught herein with a lignin-derived compound having (i) a beta-aryl ether bond and (ii) a molecular weight ranging from about 180 Daltons to about 3000 Daltons; wherein, the contacting occurs in a solvent environment in which the lignin-derived compound is soluble. The term “contacting” refers to placing an agent, such as a compound taught herein, with a target compound, and this placing can occur in situ or in vitro, for example.

[0137] The teachings are also directed to a method of cleaving a beta-aryl ether bond, the comprising contacting a polypeptide taught herein with a lignin-derived compound having (i) a beta-aryl ether bond and (ii) a molecular weight ranging from about 180 Daltons to about 3000 Daltons; wherein, the contacting occurs in a solvent environment in which the lignin-derived compound is soluble. In some embodiments, the lignin-derived compound has a molecular weight of about 180 Daltons to about 1000 Daltons. In some embodiments, the solvent environment comprises water. And, in some embodiments, the solvent environment comprises a polar organic solvent.

[0138] The teachings are also directed to a system for bioprocessing lignin-derived compounds, the system comprising a polypeptide taught herein, a lignin-derived compound having a beta-aryl ether bond and a molecular weight ranging from about 180 Daltons to about 3000 Daltons; and, a solvent in which the lignin-derived compound is soluble; wherein, the system functions to cleave the beta-aryl ether bond by contacting the polypeptide with the lignin-derived compound in the solvent.

[0139] The teachings are also directed to a recombinant polynucleotide comprising a nucleotide sequence that encodes a polypeptide taught herein. Likewise, the teachings are also directed to a vector or plasmid comprising the polynucleotide, as well as a host cell transformed by the vector or plasmid to express the polypeptide.

[0140] The teachings are also directed to a method of cleaving a beta-aryl ether bond, the method comprising (i) culturing a host cell taught herein under conditions suitable to produce a polypeptide taught herein; (ii) recovering the polypeptide from the host cell culture; and, (iii) contacting the polypeptide of claim 1 with a lignin-derived compound having a beta-aryl ether bond and a molecular weight ranging from about 180 Daltons to about 3000 Daltons; wherein, the contacting occurs in a solvent environment in which the lignin-derived compound is soluble.

[0141] In some embodiments, the host cell can be E. Coli or an Azotobacter strain, such as Azotobacter vinelandii. And, in some embodiments, the lignin-derived compound can have a molecular weight of about 180 Daltons to about 1000 Daltons.

[0142] The teachings are also directed to a system for bioprocessing lignin-derived compounds, the system comprising (i) a transformed host cell taught herein; (ii) a lignin-derived compound having a beta-aryl ether bond and a molecular weight ranging from about 180 Daltons to about 3000 Daltons; and, (iii) a solvent in which the lignin-derived compound is soluble; wherein, the system functions to cleave the beta-aryl ether bond by contacting a polypeptide taught herein with the lignin-derived compound in the solvent.

### EXAMPLES

[0143] The following examples illustrate, but do not limit, the present invention.

### Example 1

[0144] Microbial growth and metabolism studies on soluble lignin samples are performed to test the tolerance of microbes on lignin-derived compounds. A set of aromatic and nonaromatic compounds known to inhibit growth of E. coli and S. cerevisiae strains might be used to characterize the growth, tolerance and metabolic capability of Azotobacter vinelandii strain BAA1303, and A. chroococcum strain 4412 (EB Fred) X-50. Metabolism of various aromatic and nonaromatic compounds by microbial strains might be determined as a function of cellular respiration by the reduction of soluble tetrazolium salts by actively metabolizing cells. XTT (2,3-Bis(2-methoxy-4-nitro-5-sulfophenyl)-2H-tetrazolium-5-carboxanilide inner salt, Sigma) is reduced to a soluble purple formazan compound by respiring cells. E. coli might be used as the negative control strain in this study. Strains might be grown in rich medium to saturation, washed, and OD600 nm of the cultures determined. Equal numbers of bacteria will be inoculated into wells of the 48-well growth asing concentrations of aromatic and non-aromatic compounds in the range of 0-500 mM, will be added to the wells to a final volume of 0.8 ml. Following incubation for 24-48 hours with shaking at 25-37° C., the cultures will be tested for growth upon exposure to the test compounds using the XTT assay kit (Sigma). Culture samples will removed from the 48 well growth plate, and diluted appropriately in 96 well assay plates to which the XTT reagent will be added. Soluble formazan formed will be quantified by absorbance at 450 nm. Increased absorbance at 450 nm will be indicative of growth or survival, or metabolism of a particular test compound by the sprains. Table 3 lists some example compounds that can be used to test the tolerance of microbes on lignin-derived compounds.

TABLE 3

| | Test Compound |
|---|---|
| 1 | Syringic acid |
| 2 | Syringaldehyde |
| 3 | Gallic acid |
| 4 | Furfural |
| 5 | 5-Hydroxymethylfurfural |
| 6 | 4-hydroxybenzaldehyde |
| 7 | Hydroxybenzoate |
| 8 | Vanillin |
| 9 | Vanillic acid |
| 10 | Cinnamic acid |
| 11 | o-, m-and p-Coumaric acids |
| 12 | 2-hydroxy-3-methoxybenzaldehyde |
| 13 | 2,4,6-trihydroxybenzaldehyde |
| 14 | 4-hydroxy-2,6-dimethoxybenzaldehyde |

[0145] The set of lignin compounds to be tested might be expanded to any of the teachings provided herein. And, the microbial growth and metabolism studies on soluble lignin samples can also be performed actual industrial samples such as, for example, kraft lignins and biorefinery lignins.

### Example 2

[0146] This example illustrates how prospective enzymes were identified for use with the teachings provided herein. Although never successfully expressed heterologously as an industrial microbe in a commercial scale process, Sphingomonas paucimobilis has been shown to produce enzymes that have some activity in cleaving the beta aryl ether bond in lignin. See Masai, E., et al. Accordingly, the enzyme discovery effort started with running BLAST searches against the two enzymes identified by Masai as having beta etherase activity, “ligE” and “ligF”. See Id. at Abstract. Table 4 lists genes identified in the BLAST searches for initial screening.

TABLE 4

| | | | | | Identity/ |
|---|---|---|---|---|---|
| | | | | Genbank | Similarity |
| | Gene | Species | Activity | Accession # | (%) |
| 1 | ligE | Sphingomonas | Beta- | BAA02032.1 | |
| | | paucimobilis | etherase | | |
| 2 | ligE-1 | Novosphingobium | Putative | ABD26841.1 | (62%) (75%) |
| | | aromaticivorans | Beta- | | |
| | | | etherase | | |
| 3 | ligF | Sphingomonas | Beta- | BAA02031.1 | |
| | | paucimobilis | etherase | | |
| 4 | ligF-1 | Novosphingobium | Putative | ABD26530.1 | (60%) (77%) |
| | | aromaticivorans | Beta- | | |
| | | | etherase | | |
| 5 | ligF-2 | Novosphingobium | Putative | ABD27301.1 | (47%) (59%) |
| | | aromaticivorans | Beta- | | |
| | | | etherase | | |
| 6 | ligF-3 | Novosphingobium | Putative | ABD27309.1 | (37%) (57%) |
| | | aromaticivorans | Beta- | | |
| | | | etherase | | |

[0147] The nucleotide and amino acid sequences in Table 4 are incorporated herein by reference in their entirety through the GenBank Accession Numbers.

### Example 3

[0148] This example describes a method for preparing recombinant host cells for the heterologous expression of known and putative beta-etherase encoding gene sequences in Escherichia coli (E. coli). E. coli is used in this example as a surrogate enzyme production host organism for the enzyme discovery. The construction of a novel industrial host microbe, A. vinelandii is described below.

[0149] The gene sequences with accession numbers in Table 3 were synthesized directly as open reading frames (ORFs) from oligonucleotides by using standard PCR-based assembly methods, and using the E. coli codon bias with 10% threshold. The end sequences contained adaptors (NdeI and XhoI) for restriction digestion and cloning into the E. coli expression vector pET24b (Novagen). Internal NdeI and XhoI sites were excluded from the ORF sequences during design of the oligonucleotides. Assembled genes were cloned into a cloning vector (pGOV4), transformed into E. coli CH3 chemically competent cells, and DNA sequences determined from purified plasmid DNA. After sequence verification, restriction digestion was used to excise each ORF fragment from the cloning vector, and the sequence sub-cloned into pET24b. The entire set of ligE and ligF bearing plasmids were then transformed into E. coli BL21 (DE3) which served as the host strain for beta-etherase expression and biochemical activity testing.

[0150] LigE, from Accession No BAA2032.1, is listed herein as SEQ ID NO:1 for the protein and SEQ ID NO:2 for the gene. An “optimized” nucleic acid sequence was created to facilitate the transformation in E. coli and is listed herein as SEQ ID NO:977.

[0151] LigE-1, from Accession No ABD26841.1, is listed herein as SEQ ID NO:101 for the protein and SEQ ID NO:102 for the gene. An “optimized” nucleic acid sequence was created to facilitate the transformation in E. coli and is listed herein as SEQ ID NO:978.

[0152] LigF, from Accession No BAA2031.1 (P30347.1), is listed herein as SEQ ID NO:513 for the protein and SEQ ID NO:514 for the gene. An “optimized” nucleic acid sequence was created to facilitate the transformation in E. coli and is listed herein as SEQ ID NO:979.

[0153] LigF-1, from Accession No ABD26530.1, is listed herein as SEQ ID NO:539 for the protein and SEQ ID NO:540 for the gene. An “optimized” nucleic acid sequence was created to facilitate the transformation in E. coli and is listed herein as SEQ ID NO:980.

[0154] LigF-2, from Accession No ABD27301.1, is listed herein as SEQ ID NO:541 for the protein and SEQ ID NO:542 for the gene. An “optimized” nucleic acid sequence was created to facilitate the transformation in E. coli and is listed herein as SEQ ID NO:981.

[0155] LigF-3, from Accession No ABD27309.1, is listed herein as SEQ ID NO:545 for the protein and SEQ ID NO:546 for the gene. An “optimized” nucleic acid sequence was created to facilitate the transformation in E. coli and is listed herein as SEQ ID NO:982.

### Example 3

[0156] This example describes a method for gene expression in E. coli, as well as beta-etherase biochemical assays. Expression of known and putative beta-etherase genes was performed using 5 ml cultures of the recombinant E. coli strains described herein in Luria Broth medium by induction of gene expression using isopropylthiogalactoside (IPTG) to a final concentration of 0.1 mM. Following induction, and cell harvest, the cells were disrupted using either sonication or the BPER (Invitrogen) cell lysis system.

[0157] Clarified cell extracts were tested in the in vitro biochemical assay for beta-etherase activity on a fluorescent substrate, a model lignin dimer compound α-O-(β-methylumbelliferyl)acetovanillone (MUAV). In vitro reactions were performed in a total volume of 200 ul and contained: 25 mM TrisHCl pH 7.5; 0.5 mM dithiothreitol; 1 mM glutathione; 0.05 mM or 0.1 mM MUAV; 10 ul of clarified cell extract used to initiate the reactions. Following incubation for 2.5 hours at room temperature, a 50 ul sample of the reactions was terminated using 150 uL of 300 mM glycine/NaOH buffer pH 9. The formation of 4 methylumbelliferone (4MU) upon hydrolysis of the aryl ether bond was monitored by the increase in fluorescence at λₑₓ=360 nm and λₑₘ=450 nm using a Spectramax UV/visible/fluorescent spectrophotometer.

[0158] The total protein concentrations of the cell lysates were determined using the BCA reagent system for protein quantification (Pierce).

[0159] Induction might be also performed using IPTG concentrations in the range of 0.01-1 mM. Cell disruption might be also performed using toluene permeabilization, French, pressure techniques, or using multiple freeze/thaw cycles in conjunction with lysozyme. Assay conditions might be varied to include TrisHCl at 10-150 mM concentrations and in the pH range of 6.5-8.5; 0-2 mM dithiothreitol; 0.05-2 mM glutathione; 0.01-5 mM MUAV substrate; 22-42° C. reaction temperatures. The biochemical assay might be performed as a fixed time point assay with reaction times ranging from 5 minutes-12 hours, or performed continuously without quenching with glycine/NaOH buffer to extract enzyme kinetic parameters.

### Example 4

[0160] This example describes the tested biochemical activities of the newly-discovered beta-etherase enzymes.

[0161] FIG. 4 illustrates unexpected results from biochemical activity assays for beta-etherase function for the S. paucimobilis positive control polypeptides, and the N. aromaticivorans putative beta-etherase polypeptide, according to some embodiments. The much elevated beta-etherase activity exhibited by the putative ligE1 gene product from N. aromaticivorans as compared to the S. paucimobilis ligE gene product was a completely unexpected result of the enzyme discovery program.

[0162] In reactions containing 0.1 mM MUAV substrate, E. coli cell extracts expressing the N. aromaticovorans ligE1 protein yielded a total activity of 529 rfu/ug compared to 7 rfu/ug for the S. paucimobilis ligE protein. The newly discovered beta-etherase from N. aromaticovorans is approximately 75-fold more efficient than the previously described S. paucimobilis ligE beta-etherase enzyme. The highly efficient novel beta-etherase is ideally suited to be a biocatalyst for conversion of lignin aryl ethers to monomers in biotechnological processes.

[0163] It was also surprising to find that 3 novel N. aromaticivorans polypeptides having identities to the S. paucimobilis LigF sequence showed beta-etherase activity on the MUAV substrate. While all 3 putative ligF gene products from N. aromaticivorans exhibited beta-etherase activity, the LigF2 polypeptide is approximately 2-fold more efficient than the S. paucimobilis LigF protein. The N. aromaticovorans LigF2 protein yielded a total activity of 1206 rfu/ug compared to 558 rfu/ug for the S. paucimobilis LigF protein.

[0164] As such, the enzyme discovery program unexpectedly and surprisingly generated four (4) novel polypeptides from N. aromaticivorans with beta-etherase activity. This set of enzymes show great potential for the catalysis of a complete depolymerization of lignin-derived compounds. The results were unexpected and surprising for at least the following reasons:

[0165] Four (4) novel gene sequences encoding polypeptides with beta-etherase activity were discovered from N. aromaticivorans. These sequences have GenBank Nos. ABD26841.1 (SEQ ID NO:101); ABD26530.1 (SEQ ID NO:539); ABD27301.1 (SEQ ID NO:541); and ABD27309.1 (SEQ ID NO:545).

[0166] One of skill will appreciate that the bioinformatic screen that was used to help identify putative enzymes is not a definitive predictor in itself of biochemical activities, particularly in view of (i) having only one known active enzyme for LigE in a different species, (ii) one known active enzyme for LigF, and (iii) the unexpected extent of such activities discovered. The tests for function therefore had to be performed empirically on the N. aromaticivorans putative beta-etherase gene set.

[0167] One of skill will also appreciate that the discovery of beta-etherase activities for all 4 N. aromaticivorans polypeptides was a complete surprise given the relatively low levels of identities (37%-62%) the sequences had with respect to the S. paucimobilis LigE and LigF proteins.

[0168] One of skill will also appreciate that the discovery of 2 novel beta-etherases from the N. aromaticivorans with improved activities over the corresponding LigE and LigF proteins from S. paucimobilis were completely unexpected, and this exciting discovery provides a foundation for further enzyme development for industrial applications.

### Example 5

[0169] This example describes the extended use of bioinformatics to identify a pool of putative enzymes in the discovery program. As noted above, the bioinformatic screen that was used to help identify putative enzymes initially was not a definitive predictor in itself of biochemical activities, particularly in view of (i) having only one known active enzyme for LigE in a different species, (ii) one known active enzyme for LigF, and (iii) the unexpected extent of such activities discovered. Having the additional known active enzymes provided more information that could be used to enhance the effectiveness of the bioinformatics in identifying the pool of putative enzymes for both LigE-type and LigF-type enzymes.

[0170] Sequence to function correlations for the newly discovered beta-etherases were analyzed and identified. A bioinformatic survey of functional domains, essential catalytic residues, and sequence alignments was performed for the N. aromaticivorans LigE and LigF polypeptides. While not intending to be bound by any theory or mechanism of action, the rationale and key results of the survey include at least the following:

[0171] Identifying Functional Domains

[0172] As shown in FIG. 4, high levels of beta-etherase activities were discovered for the N. aromaticivorans LigE1 and LigF2 polypeptide sequences compared to the S. paucimobilis LigE and LigF proteins. The N. aromaticivorans LigE1 and LigF2 polypeptide sequences were used as query sequences for the identification of functional domains using the Conserved Domain Database (CDD) in GenBank.

[0173] The N. aromaticivorans LigE1 polypeptide is annotated as a glutathione S-transferase (GST)-like protein with similarity to the GST_C family, and the beta-etherase LigE subfamily. The LigE sub-family is composed of proteins similar to S. paucimobilis beta etherase, LigE, a GST-like protein that catalyzes the cleavage of the beta-aryl ether linkages present in low-moleculer weight lignins using reduced glutathione (GSH) as the hydrogen donor in the reaction. The GST fold contains an N-terminal thioredoxin-fold domain and a C-terminal alpha helical domain, with an active site located in a cleft between the two domains.

[0174] Table 5 describes conserved domains and essential amino acid residues in the N. aromaticivorans LigE1 polypeptide (ABD26841.1), according to some embodiments. The three (3) conserved functional domains annotated in the N. aromaticivorans LigE1 polypeptide are: i) the dimer interface; ii) the N terminal domain; iii) the lignin substrate binding pocket or the H site. Amino acid residues defining the functional domains in such embodiments are residues 98-221 in the N. aromaticivorans LigE1 polypeptide.

[0175] Table 5 also lists fifteen (15) amino acid residues as conserved and essential for catalytic activity (column 3 of Table 5), according to some embodiments. These include: K100; A101; N104; P166; W107; Y184; Y187; R188; G191; G192; F195; V111; G112; M115; F116. While not intending to be bound by any theory or mechanism of action, these residues appear responsible for the high beta-etherase catalytic activity discovered for the N. aromaticivorans LigE1 polypeptide compared to the S. paucimobilis ligE polypeptide.

[0176] In such embodiments, the essential amino acid residues of the N. aromaticivorans LigE1 polypeptide might be altered conservatively, and singly or in combination with similar amino acid residues that would retain or improve the catalytic function of the N. aromaticivorans LigE1 polypeptide. Examples of such alternate residues that might be incorporated at the essential positions are also shown in column 4 of Table 5.

TABLE 5

| | Residues | Conserved | |
|---|---|---|---|
| | defining the | residues essential | |
| | domain in | for catalysis in | Alternate residues |
| Functional | N. aromaticivorans | N. aromaticivorans | suggested for the |
| domain | LigE1 | LigE1 | essential positions |
| Dimer interface | (residues 98-221 of | K100; A101; N104; | K100->R |
| | SEQ ID NO: 101) | P166 | A101->L; I; V; G; S |
| | | | N104->Q; H; S; A |
| N terminal | (residues 98-221 of | K100; W107; Y184; | K100->R |
| domain interface | SEQ ID NO: 101) | Y187; R188; G191; | W107->Y; F; A; S |
| | | F195 | Y184->W; F; A; S |
| | | | Y187-> W; F; A; S |
| | | | R188->K |
| | | | G191-> L; I; V; A; S |
| | | | F195->W; Y; A; S |
| Lignin/substrate | (residues 98-221 of | W107; V111; G112; | W107->Y; F; A; S |
| binding pocket or | SEQ ID NO: 101) | M115; F116; G192; | V111-> L; I; G; A; S |
| H site | | F195 | G112-> L; I; V; A; S |
| | | | M115->S; A; G |
| | | | G192-> L; I; V; A; S |
| | | | F195-> W; Y; A; S |

[0177] The N. aromaticivorans LigF2 polypeptide is annotated as a glutathione S-transferase (GST)-like protein with similarity to the GST_C family, catalyzing the conjugation of glutathione with a wide range of xenobiotic agents.

[0178] Table 6 describes conserved domains and essential amino acid residues in the N. aromaticivorans LigF2 polypeptide (ABD27301.1), according to some embodiments. The three (3) conserved functional domains annotated for the N. aromaticivorans LigF2 polypeptide are similar to those described for the N. aromaticivorans LigE polypeptide and comprise: i) the dimer interface; ii) the N terminal domain; iii) the substrate binding pocket or the H site. In such embodiments, amino acid residues defining the functional domains are residues 99-230 in the N. aromaticivorans LigF2 polypeptide.

[0179] Table 6 also lists sixteen (16) amino acid residues as conserved and essential for catalytic activity (column 3 of Table 6) of the N. aromaticivorans LigF2 polypeptide, according to some embodiments. These include: R100; Y101; K104; K176; D107; L194; I197; N198; S201; M206; M111; N112; S115; M116; M206; H202. While not intending to be bound by any theory or mechanism of action, these 16 residues appear to be responsible for the high beta-etherase catalytic activity discovered for the N. aromaticivorans LigF2 polypeptide compared to the S. paucimobilis LigF polypeptide.

[0180] In such embodiments, the essential amino acid residues of the N. aromaticivorans LigF2 polypeptide might be altered conservatively, and singly or in combination with similar amino acid residues that would retain or improve the catalytic function of the N. aromaticivorans LigF2 polypeptide. Examples of such alternate residues that might be incorporated at the essential positions are shown in column 4 of Table 6.

TABLE 6

| | Residues | Conserved | |
|---|---|---|---|
| | defining the | residues essential | |
| | domain in | for catalysis in | Alternate residues |
| Functional | N. aromaticivorans | N. aromaticivorans | suggested for the |
| domain | LigF2 | LigF2 | essential positions |
| Dimer interface | (residues 99-230 of | R100; Y101; K104; | R100->K |
| | SEQ ID NO: 541) | K176 | Y101-> W; F; A; S |
| | | | K104->R |
| | | | K176->R |
| N terminal | (residues 99-230 of | R100; D107; L194; | R100->K |
| domain interface | SEQ ID NO: 541) | I197; N198; S201; | D107->E |
| | | M206 | L194-> V; I; G; A; S |
| | | | I197-> L; V; G; A; S |
| | | | N198->Q |
| | | | S201->A; M; G |
| | | | M206->S; A; G |
| Substrate | (residues 99-230 of | D107; M111; N112; | D107->E |
| binding pocket | SEQ ID NO: 541) | S115; M116; M206; | M111->S; A; G |
| or H site | | H202 | N112->Q |
| | | | S115->A; M; G |
| | | | M116->S; A; G |
| | | | M206->S; A; G |
| | | | H202->N; Q; S; M |

[0181] Identifying Additional Functional Domains

[0182] Bioinformatic methods were used to further understand the protein structure that may result in the desired activities. First, the LigE1 and LigF2 were analyzed together. Amino acid sequence alignments were performed using the N. aromaticivorans ligE1 (ABD26841.1) and ligF2 (ABD27301.1) sequences using the BLAST-P program in GenBank, and the Propom and PraLine programs. Full length sequence alignments yielded hits with relatively low identities, for example, identities of <70%.

[0183] Next, regions in LigE1 and LigF2 were analyzed independently in GENBANK. For LigE1, an alignment was performed against the database in GENBANK using the following query sequence: “tispfvwatkyalkhkgfdldvvpggftgilertgg” (residues 19-54 of SEQ ID NO:101), from N. aromaticivorans ligE1. The BLAST yielded at least 3 subject sequences with high identities in the thioredoxin (TRX)-like superfamily of proteins containing a TRX fold. Many members contain a classic TRX domain with a redox active CXXC motif.

[0184] Without intending to be bound by any theory or mechanism of action, they are thought to function as protein disulfide oxidoreductases (PDOs), altering the redox state of target proteins via the reversible oxidation of their active site dithiol. The PDO members of this superfamily include the families of TRX, protein disulfide isomerase (PDI), tlpA, glutaredoxin, NrdH redoxin, and bacterial Dsb proteins (DsbA, DsbC, DsbG, DsbE, DsbDgamma). Members of the superfamily that do not function as PDOs but contain a TRX-fold domain include phosducins, peroxiredoxins, glutathione (GSH) peroxidases, SCO proteins, GSH transferases (GST, N-terminal domain), arsenic reductases, TRX-like ferredoxins and calsequestrin, among others.

[0185] Table 7 lists 3 subject sequences having high identities (>80%) to residues 19-54 of LigE-1 (SEQ ID NO:101). In some embodiments, these sequences are likely to be essential to catalytic functions similar to those discovered for the N. aromaticivorans ligE1 polypeptide.

TABLE 7

| | | | Identity/Similarity to |
|---|---|---|---|
| | | | N. aromaticovorans |
| | | | LigE1 query |
| | | GenBank | sequence residues |
| Subject sequence | Species; Gene | accession # | 19-54 (%) |
| (residues 19-54 of | Sphingomonas | BAA02032.1 | 89/97 |
| SEQ ID NO: 1) | paucimobilis; beta | | |
| TISPYVWRTKYALKHKGFDI | etherase | | |
| DIVPGGFTGILERTGG | | | |
| (residues 19-54 of | Novosphingobium sp. | YP004533906.1 | 86/92 |
| SEQ ID NO: 89) | PP1Y; glutathione S | | |
| TISPFVWRTKYALAHKGFD | transferase like | | |
| VDIVPGGFTGIAERTGG | protein | | |
| (residues 19-54 of | Sphingobium sp. SYK-6; | BAJ11989.1 | 83/94 |
| SEQ ID NO: 3) | beta-etherase | | |
| TISPFVWATKYAIAHKGFEL | | | |
| DIVPGGFSGIPERTGG | | | |

[0186] The nucleotide and amino acid sequences in Table 7 are incorporated herein by reference in their entirety through the GenBank Accession Numbers.

[0187] Likewise, for LigF2, separate alignments were performed against the database in GENBANK using the following 2 query sequences: “ainpegqvpvl” (residues 47-57 of SEQ ID NO:541); and “iithttvineyled” (residues 63-76 of SEQ ID NO:541), from N. aromaticivorans ligF2 (ABD27301.1) yielded multiple subject sequences with high identities in the GST-N superfamily of proteins. Without intending to be bound by any theory or mechanism of action, the N terminal region (residues 43-75 of SEQ ID NO:541) of the N. aromaticivorans ligF2 polypeptide is annotated in the CDD to encompass:

[0188] i. N terminal residues thought to make contact with the C terminal interface in forming the tertiary protein structure for the GST-N family of proteins;

[0189] ii. N terminal residues thought to be involved in dimerization of the polypeptides; and,

[0190] iii. Residues thought to be involved in the binding of glutathione substrate.

[0191] Table 8 provides the percent identities and similarities to N. aromaticovorans LigF2 query sequence residues 47-57.

TABLE 8

| | | | Identity/Similarity to N. |
|---|---|---|---|
| | | | aromaticovorans LigF2 |
| | | GenBank | query sequence |
| Subject sequence | Species; Gene | accession # | residues 47-57 (%) |
| (residues 45-55 of | Proteus mirabilis ATCC | ZP_03840063.1 | 91/91 |
| SEQ ID NO: 983) | 29906; glutathione S- | | |
| AINPKGQVPVL | transferase | | |
| (residues 60-70 of | Neisseria macacae ATCC | ZP_08683997.1 | 82/91 |
| SEQ ID NO: 985) | 33926; glutathione S- | | |
| AINPQGQVPAL | transferase | | |
| (residues 43-53 of | Rhodospirillum rubrum; | YP_425114.1 | 82/91 |
| SEQ ID NO: 987) | glutathione S-transferase- | | |
| AMNPEGEVPVL | like protein | | |
| (residues 46-56 of | Neisseria sicca ATCC | ZP_05317369.1 | 82/91 |
| SEQ ID NO: 989) | 29256; glutathione S- | | |
| AINPQGQVPAL | transferase | | |
| (residues 46-56 of | Neisseria mucosa ATCC | ZP_05978410.1 | 82/91 |
| SEQ ID NO: 991) | 25996; glutathione S- | | |
| AINPQGQVPAL | transferase | | |
| (residues 19-29 of | alpha proteobacterium | ZP_02189431.1 | 82/91 |
| SEQ ID NO: 993) | BALI 99; Glutathione S- | | |
| AINPAGEVPVL | transferase-like protein | | |
| (residues 31-41 of | Marinomonas sp. MED121; | ZP_01077889.1 | 91/91 |
| SEQ ID NO: 995) | glutathione S-transferase | | |
| AINPLGQVPVL | | | |
| (residues 46-55 of | Proteus penneri ATCC | ZP_03805830.1 | 90/90 |
| SEQ ID NO: 997) | 35198; hypothetical protein | | |
| INPKGQVPVL | PROPEN 04226 | | |
| (residues 45-55 of | AURANDRAFT_7474 | EGB13094.1 | 82/91 |
| SEQ ID NO: 999) | Aureococcus | | |
| AINPQGKVPVL | anophagefferens; | | |
| | hypothetical protein | | |

[0192] The nucleotide and amino acid sequences in Table 8 are incorporated herein by reference in their entirety through the GenBank Accession Numbers.

[0193] Table 9 provides the percent identities and similarities to N. aromaticovorans LigF2 query sequence residues 63-76.

TABLE 9

| | | | Identity/Similarity to N. |
|---|---|---|---|
| | | | aromaticovorans |
| | | GenBank | LigF2 query sequence |
| Subject sequence | Species; Gene | accession # | residues 63-76 (%) |
| (residues 107-115 of | Trichophyton verrucosum | XP_003019921.1 | 100/100 |
| SEQ ID NO: 1001) | HKI 0517; conserved | | |
| TVINEYLED | hypothetical protein | | |
| (residues 103-111 of | Arthroderma benhamiae | XP_003017304.1 | 100/100 |
| SEQ ID NO: 1003) | CBS 112371; conserved | | |
| TVINEYLED | hypothetical protein | | |
| (residues 72-80 of | Trichophyton rubrum CBS | XP_003232549.1 | 100/100 |
| SEQ ID NO: 1005) | 118892; glutathione | | |
| TVINEYLED | transferase | | |
| (residues 62-75 of | Novosphingobium sp. PP1Y; | YP_004533905.1 | 79/79 |
| SEQ ID NO: 1007) | glutathione S-transferase- | | |
| IITESTVICEYLED | like protein | | |
| (residues 84-92 of | Arthroderma gypseum CBS | XP_003171868.1 | 89/100 |
| SEQ ID NO: 1009) | 118893; hypothetical protein | | |
| TVINEFLED | MGYG_06412 | | |
| (residues 61-69 of | Trichophyton equinum CBS | EGE04518.1 | 89/100 |
| SEQ ID NO: 1011) | 127.97; hypothetical protein | | |
| TVINEFLED | TEQG_03389 | | |

[0194] The nucleotide and amino acid sequences in Table 9 are incorporated herein by reference in their entirety through the GenBank Accession Numbers.

[0195] The bioinformatics provides valuable information about protein structure that can assist in identifying test candidates. For example, the LigE1 has the 98-221 region, which is annotated in the databases as potentially responsible as component of binding and activity, dimerization, and for binding and catalysis in general. While not intending to be bound by any theory or mechanism of action, the variability in active site structures is reflected by the variability in substrate structures. Likewise, upon further research using bioinformatics, it was further discovered that the 19-54 region, which is annotated in the databases as a second region that is potentially responsible as component of the reductase function, and thus potentially responsible for catalysis in addition to the 98-221 region, while having more conservation between members.

[0196] Obtaining additional structural information that will assist in finding high performing proteins within each family of strains is within the scope of the teachings to the extent that the methodology is known to one of skill. A variety of research techniques are known to one of skill. Bioinformatic methods, such as motif finding, are an example of one way to obtain the additional structural information. Motif finding, also known as profile analysis, constructs global multiple sequence alignments that attempt to align short conserved sequence motifs among the sequences in the query set. This can be done, for example, by first constructing a general global multiple sequence alignment, after which highly conserved regions are isolated, in a manner similar to what is taught herein, and used to construct a set of profile matrices. The profile matrix for each conserved region is arranged like a scoring matrix but its frequency counts for each amino acid or nucleotide at each position are derived from the conserved region's character distribution rather than from a more general empirical distribution. The profile matrices are then used to search other sequences for occurrences of the motif they characterize.

[0197] LigE-1 and LigF-2 were further examined by comparing their structures to other polypeptides of the LigE-type and LigF-type, respectively. Table 10A shows conserved residues between the polypeptide sequences of LigE and LigE-1, and Table 10B shows shows conserved residues between the polypeptide sequences of LigF and LigF-2.

TABLE 10A

| Res | Pos |
|---|---|
| M | 1 |
| A | 2 |
| N | 4 |
| N | 5 |
| T | 6 |
| I | 7 |
| T | 8 |
| Y | 10 |
| D | 11 |
| L | 12 |
| L | 14 |
| G | 17 |
| T | 19 |
| I | 20 |
| S | 21 |
| P | 22 |
| V | 24 |
| W | 25 |
| T | 27 |
| K | 28 |
| Y | 29 |
| A | 30 |
| L | 31 |
| K | 32 |
| H | 33 |
| K | 34 |
| G | 35 |
| F | 36 |
| D | 37 |
| D | 39 |
| V | 41 |
| P | 42 |
| G | 43 |
| G | 44 |
| F | 45 |
| T | 46 |
| G | 47 |
| I | 48 |
| L | 49 |
| E | 50 |
| R | 51 |
| T | 52 |
| G | 53 |
| G | 54 |
| E | 57 |
| R | 58 |
| P | 60 |
| I | 62 |
| V | 63 |
| D | 64 |
| D | 65 |
| G | 66 |
| E | 67 |
| V | 69 |
| L | 70 |
| D | 71 |
| S | 72 |
| W | 73 |
| I | 75 |
| E | 77 |
| Y | 78 |
| L | 79 |
| D | 80 |
| K | 82 |
| Y | 83 |
| P | 84 |
| D | 85 |
| R | 86 |
| P | 87 |
| L | 89 |
| K | 100 |
| L | 102 |
| D | 103 |
| N | 104 |
| W | 105 |
| W | 107 |
| A | 110 |
| V | 111 |
| G | 112 |
| P | 113 |
| W | 114 |
| C | 117 |
| D | 121 |
| Y | 122 |
| D | 124 |
| L | 125 |
| S | 126 |
| L | 127 |
| P | 128 |
| Q | 129 |
| D | 130 |
| Y | 133 |
| V | 134 |
| S | 137 |
| R | 138 |
| E | 139 |
| L | 148 |
| E | 149 |
| V | 151 |
| Q | 152 |
| A | 153 |
| G | 154 |
| R | 155 |
| E | 156 |
| R | 158 |
| L | 159 |
| P | 160 |
| L | 166 |
| E | 167 |
| P | 168 |
| R | 170 |
| L | 173 |
| A | 174 |
| W | 178 |
| L | 179 |
| G | 180 |
| G | 181 |
| P | 184 |
| N | 185 |
| A | 187 |
| D | 188 |
| Y | 189 |
| T | 198 |
| A | 199 |
| S | 200 |
| V | 201 |
| T | 204 |
| P | 205 |
| L | 207 |
| D | 210 |
| D | 211 |
| P | 212 |
| L | 213 |
| R | 214 |
| D | 215 |
| W | 216 |
| R | 219 |
| D | 222 |
| L | 223 |
| G | 226 |
| L | 227 |
| G | 228 |
| R | 229 |
| H | 230 |
| P | 231 |
| G | 232 |
| P | 235 |
| L | 236 |
| F | 237 |
| G | 238 |
| L | 239 |
| R | 242 |
| E | 243 |
| G | 244 |
| D | 245 |
| P | 246 |
| F | 249 |
| R | 251 |
| G | 254 |
| G | 257 |
| N | 264 |
| G | 266 |
| P | 267 |
| T | 270 |
| R | 275 |
| E | 278 |

[0198] As can be seen, there is a high degree of between-species similarity between LigE and LigE-1 in the LigE-type family. The LigE residues are from S. paucimobilis (BAA02032.1) and the LigE-1 residues are from N. aromaticivorans LigE1 (ABD26841.1). The numbering is done according to the S. paucimobilis sequence (BAA02032.1) in the PRALINE alignment file (gaps not included).

TABLE 10B

| Res | Pos |
|---|---|
| M | 1 |
| Y | 6 |
| P | 10 |
| A | 12 |
| N | 13 |
| S | 14 |
| K | 16 |
| L | 21 |
| E | 23 |
| K | 24 |
| G | 25 |
| L | 26 |
| E | 29 |
| D | 34 |
| F | 38 |
| E | 39 |
| H | 41 |
| F | 45 |
| I | 48 |
| N | 49 |
| P | 50 |
| G | 52 |
| V | 54 |
| P | 55 |
| T | 65 |
| T | 68 |
| I | 70 |
| E | 72 |
| Y | 73 |
| L | 74 |
| E | 75 |
| D | 76 |
| L | 85 |
| P | 87 |
| D | 89 |
| R | 97 |
| W | 99 |
| K | 101 |
| L | 161 |
| K | 167 |
| E | 176 |
| L | 179 |
| L | 185 |
| Y | 190 |
| L | 192 |
| A | 193 |
| D | 194 |
| I | 195 |
| P | 221 |
| L | 223 |
| W | 226 |
| R | 229 |
| R | 233 |
| P | 234 |
| A | 235 |

[0199] As can be seen, there is less between-species similarity between LigF and LigF-2 in the LigF-type family. The LigF residues are from S. paucimobilis (BAA02031.1) and the LigF-2 residues are from N. aromaticivorans (ABD27301.1). Numbering is according to the S. paucimobilis sequence (BAA02031.1) in the PRALINE alignment file (gaps not included.

### Example 6

[0200] This example provides additional sequences for a second round of assays, the sequences containing the 3 conserved functional domains described herein for the GST_C family of proteins, and belong to the beta-etherase LigE subfamily. Table 11 lists nine (9) additional sequences having identities of 51%-73% at the amino acid level that were identified in the SwissProt database using the S. paucimobilis LigE sequence (P27457.3) as the query. The bioinformatics information suggests that these 9 sequences are excellent candidates for the next round of synthesis, cloning, expression and testing for the desired biochemical functions using the methods described herein.

TABLE 11

| | | | Identity to |
|---|---|---|---|
| | | | S. paucimobilis |
| | | Accession # | LigE |
| | Annotation | SwissProt/GenBank | polypeptide (%) |
| 7 | Dianthus caryophyllus; Glutathione S | P28342.1/121736 | 59 |
| | transferase | | |
| 8 | Euforbua esula; Glutathione S | P57108.1/11132235 | 51 |
| | transferase | | |
| 9 | Zea mays; Glutathione S transferase | P04907.4/1170090 | 70 |
| 10 | Pseudomonas aeruginosa; | P57109.1/11133449 | 58 |
| | Maleylacetoacetate isomerase | | |
| 11 | Zea mays; Glutathione S transferase | P46420.2/1170092 | 63 |
| 12 | Arabidopsis thaliana; Glutathione S | Q8L7C9.1/75329755 | 61 |
| | transferase | | |
| 13 | Arabidopsis thaliana; Glutathione S | P42769.1/1170093 | 73 |
| | transferase | | |
| 14 | Oryza sativa Japonica Group; | O65857.2/57012737 | 59 |
| | Probable Glutathione S transferase | | |
| 15 | Oryza sativa Japonica Group; | O82451.3/57012739 | 62 |
| | Probable Glutathione S transferase | | |

[0201] The nucleotide and amino acid sequences in Table 11 are incorporated herein by reference in their entirety through the GenBank Accession Numbers.

### Example 7

[0202] This example describes how native lignin core structures can be hydrolyzed by the action of C alpha-dehydrogenases, beta-etherases, and glutathione-eliminating enzymes.

[0203] FIG. 5 illustrates beta-aryl-ether compounds to be tested as substrates representing native lignin structures, according to some embodiments. While MUAV was used as a model substrate in the identification of novel beta-etherase enzymes, additional aryl-ether compounds such as those shown in FIG. 5 might be used to assess substrate specificities of the beta-etherases towards dimers and trimers of aromatic compounds containing the beta-aryl ether linkage and representative of native lignin structures. Higher order oligomers of molecular weights <2000 might be synthesized and tested as well. The compounds might be obtained by custom organic synthesis, as for the fluorescent substrate MUAV.

[0204] FIG. 6 illustrates pathways of guaiacylglycerol-β-guaiacyl ether (GGE) metabolism by S. paucimobilis, according to some embodiments. Enzymes in addition to LigE/F-like beta etherases might be required to hydrolyze native lignin core structures. The model β-aryl ether compound guaiacylglycerol-β-guaiacyl ether (GGE) is believed to contain the main chemical linkages present in native lignin, including the hydroxyl, aryl-ether and methoxy functionalities. The biotransformation of GGE to the lignin monomer beta-hydroxypropiovanillone (beta-HPV) is partially understood for S. paucimobilis, and proposed to occur via the action of 3 separate enzymes in a step-wise manner. The ligD gene product encodes a C alpha-dehydrogenase which oxidizes GGE to α-(2-methoxyphenoxy)-β-hydroxypropiovanillone (MPHPV); the ether bond of MPHPV is cleaved by the beta-etherase activities of the ligE and ligF gene products to yield the lignin monomer guaiacol, and α-glutathionylhydroxypropiovanillone (GS-HPV), respectively. The ligG gene product encodes a glutathione (GSH)-eliminating glutathione S transferase (GST) which catalyzes the elimination of glutathione (GSH) from GS-HPV to yield the lignin hydroxypropiovanillone (HPV).

[0205] While the LigE and LigF polypeptides, or similar ones described herein, might be sufficient to hydrolyze native lignin structures, it would be useful to discover novel C alpha dehydrogenases (S. paucimobilis LigD homologs) and glutathione (GSH)-eliminating glutathione S transferases (S. paucimobilis LigG homologs) for industrial applications. The enzyme discovery programs might be conducted by methods similar to those described herein. The detection of lignin substrates, intermediates, and products of biochemical reactions might be measured following filtration, and the extraction of substrates and products into ethyl acetate. Substrates and products might be separated using reverse phase HPLC conditions with a C18 column developed with a gradient solvent system of methanol and water, and detected at 230 nm or 254 nm.

[0206] Table 12 lists potential C alpha-dehydrogenase polypeptide sequences, the LigD-type, for use in conjunction with beta etherases including, but not limited to, LigE/F. The sequences were identified using bioinformatic methods, such as those taught herein. These C alpha-dehydrogenases are classified in the CDD as short-chain dehydrogenase/reductases (SDRs) and are a functionally diverse family of oxidoreductases that have a single domain with a structurally conserved Rossmann fold (alpha/beta folding pattern with a central beta-sheet), an NAD(P)(H)-binding region, and a structurally diverse C-terminal region. Classical SDRs are typically about 250 residues long, while extended SDRs are approximately 350 residues. Sequence identity between different SDR enzymes are typically in the 15-30% range, but the enzymes share the Rossmann fold NAD-binding motif and characteristic NAD-binding and catalytic sequence patterns.

[0207] Without intending to be bound by any theory or mechanism of action, these enzymes are thought to catalyze a wide range of activities including the metabolism of steroids, cofactors, carbohydrates, lipids, aromatic compounds, and amino acids, and act in redox sensing. Classical SDRs have an TGXXX[AG]XG cofactor binding motif and a YXXXK active site motif, with the Tyr residue of the active site motif serving as a critical catalytic residue (Tyr-151, human prostaglandin dehydrogenase (PGDH) numbering). In addition to the Tyr and Lys, there is often an upstream Ser (Ser-138, PGDH numbering) and/or an Asn (Asn-107, PGDH numbering) contributing to the active site; while substrate binding is in the C-terminal region, which determines specificity.

[0208] Without intending to be bound by any theory or mechanism of action, the standard reaction mechanism is thought to be a 4-pro-S hydride transfer and proton relay involving the conserved Tyr and Lys, a water molecule stabilized by Asn, and nicotinamide. Extended SDRs have additional elements in the C-terminal region, and typically have a TGXXGXXG cofactor binding motif. Complex (multidomain) SDRs such as ketoreductase domains of fatty acid synthase can have a GGXGXXG NAD(P)-binding motif and an altered active site motif (YXXXN). Fungal type ketoacyl reductases can have a TGXXXGX(1-2)G NAD(P)-binding motif. Some atypical SDRs are thought to have lost catalytic activity and/or have an unusual NAD(P)-binding motif and missing or unusual active site residues. Reactions catalyzed within the SDR family can include isomerization, decarboxylation, epimerization, C═N bond reduction, dehydratase activity, dehalogenation, Enoyl-CoA reduction, and carbonyl-alcohol oxidoreduction.

TABLE 12

| | | | Identity/Similarity to |
|---|---|---|---|
| | | GenBank Accession | S. paucimobilis LigD |
| | Species | Numbers | polypeptide (%) |
| 1 | N. aromaticivorans | YP495487.1 | 78/88 |
| 2 | N. aromaticivorans | YP496072.1 | 39/58 |
| 3 | N. aromaticivorans | YP496073.1 | 39/59 |
| 4 | N. aromaticivorans | YP495984.1 | 35/56 |
| 5 | N. aromaticivorans | YP497149.1 | 38/58 |

[0209] The nucleotide and amino acid sequences in Table 12 are incorporated herein by reference in their entirety through the GenBank Accession Numbers.

[0210] Table 13 lists potential LigG (glutathione-eliminating)-like enzyme sequences for use in conjunction with beta etherases including, but not limited to, LigE/F. The sequences were identified using bioinformatic methods, such as those taught herein. These might be utilized in conjunction with C-alpha dehydrogenases, and/or with LigE/F-like beta-etherases. The LigG-like proteins are annotated in the CDD as glutathione S-transferase (GST)-like proteins with similarity to the GST_C family, the GST-N family, and the thioredoxin (TRX)— like superfamily of proteins containing a TRX fold.

TABLE 13

| | | | Identity/Similarity to |
|---|---|---|---|
| | | GenBank Accession | S. paucimobilis LigG |
| | Species | Numbers | polypeptide (%) |
| 1 | N. aromaticovorans | YP_498160.1 | 23/41 |
| 2 | A. vinelandii DJ | YP_002798340 | 32/50 |

[0211] The nucleotide and amino acid sequences in Table 13 are incorporated herein by reference in their entirety through the GenBank Accession Numbers.

### Example 8

[0212] This example describes the creation of a novel recombinant microbial system for the conversion of lignin oligomers to monomers. Azotobacter vinelandii strain BAA-1303 DJ, for example, might be transformed with beta-etherase encoding genes from N. aromaticovorans with the objective of creating a lignin phenolics-tolerant A. vinelandii strain capable of converting lignin oligomers to monomers at high yields in industrial processes. Table 14 lists additional A. vinelandii strains that might be used as host strains for beta-etherase gene expression, for example, by their strain designation and American Type Culture Collection (ATCC) number.

TABLE 14

| | Strain | | | Strain | | | Strain | |
|---|---|---|---|---|---|---|---|---|
| | Desig- | ATCC | | Desig- | ATCC | | Desig- | ATCC |
| # | nation | Number | # | nation | Number | # | nation | Number |
| 1 | Wiscon- | 12518 | 8 | Ad116 | 17962 | 14 | B-6 | 7489 |
| | sin O | | | | | | | |
| 2 | 3a | 12837 | 9 | NRS 16 | 25308 | 15 | B-9 | 7492 |
| 3 | AV-3 | 13266 | 10 | UWD | 478 | 16 | 37 | 9046 |
| 4 | AV-4 | 13267 | 11 | 113 | 53800 | 17 | V1 | 7496 |
| 5 | AV-5 | 13268 | 12 | B-1 | 7484 | 18 | 3 | 9047 |
| 6 | OP | 13705 | 13 | B-4 | 7487 | | | |
| 7 | 135 | 53799 | — | — | — | — | — | — |
| | [VKM B- | | | | | | | |
| | 547] | | | | | | | |

[0213] The heterologous production of beta etherases, Cα dehydrogenases, and other enzymes for the production of lignin monomers and aromatic products in A. vinelandii might be achieved using the expression plasmid system described herein. The broad host range multicopy plasmid pKT230 (ATCC) encoding streptomycin resistance might be used for gene cloning. Genes can be synthesized by methods describe above, and cloned into the SmaI site of pKT230. The nifH promoter from A. vinelandii strain BAA 1303 DJ can be used to control gene expression.

[0214] A. vinelandii strain BAA 1303 DJ might be transformed with pKT230 derivatives using electroporation of electrocompetent cell (Eppendorf method), or by incubation of plasmid DNA with chemically competent cells prepared in TF medium (1.9718 g of MgSO4, 0.0136 g of CaSO4, 1.1 g of CH3COONH4, 10 g of glucose, 0.25 g of KH2PO4, and 0.55 g of K2HPO4 per liter). Transformants might be selected by screening for resistance to streptomycin. Gene expression might be induced by cell growth under nitrogen-free Burk's medium (0.2 g of MgSO4, 0.1 g of CaSO4, 0.5 g of yeast extract, 20 g of sucrose, 0.8 g of K2HPO4, and 0.2 g of KH2PO4, with trace amounts of FeCl3 and Na2MoO4, per liter).

[0215] The biochemical activity of a newly-discovered beta-etherase enzyme functionally expressed in A. vinelandii strain BAA 1303 DJ can be tested using methods known to one of skill, such as the methods provided herein. Biochemical activity assays for beta-etherase function, and for total protein might be performed as described herein.

### Example 9

[0216] This example describes the design and use of recombinant Azotobacter strains heterologously expressing enzymes for the production of high value aromatic compounds from lignin core structures. Table 15 lists a few examples of aromatic compounds that might be produced by the microbial platforms described herein.

TABLE 15

| | Market | | |
|---|---|---|---|
| | Volume | Market | |
| Chemical | (metric | Value | |
| Product | ton/year) | ($/lb) | Uses |
| [chemical structure] | 30 × 10³ | 2.34 | Antioxidant: 4-tert- butylcatechol. Flavors: piperonal; veratrol. Insecticides: carbofuran; propoxur. |
| [chemical structure] | 20 × 10³ | 6.12 | Flavor agent. Precursor for pharmaceutical methyldopa. |
| [chemical structure] | 3 × 10⁶ | 1.65 | Precursor to toluene diisocyanates for urethane polymers. |
| [chemical structure] | 1.6 × 10³ (US) | 3.92 | Precursor to analgesic drug acetylsalicylic acid. Precursor to fragrances: amyl and methyl esters of salicylic acid. |
| [chemical structure] | | 57.38 | Tuberculosis drug. |
| [chemical structure] | 38 × 10³ | 0.8 | Precursors to herbicides: 4-chloro-2- methylphenoxyacetic acid; 2-(4-chloro-2- methylphenoxy)- propionic acid. |

[0217] One example of a microbial process to a commercial aromatic compound might be the production of catechol from lignin-derived phenolic compounds. Catechol might be produced from guaiacol using an A. vinelandii or A. chroococcum strain engineered with enzymes including beta-etherases and demethylases, or demethylase enzymes alone. Azotobacter strains might be engineered to express the heterologous enzymes by the methods described herein.

[0218] FIG. 7 illustrates an example of a biochemical process for the production of catechol from lignin oligomers, according to some embodiments. The biochemical processes leading to aromatic products such as catechol might be designed as 3 unit operations described below:

[0219] i) Fractionation of soluble lignin—Concentration or partial purification of soluble biorefinery lignin fractions or phenolic streams using methods known to one of skill.

[0220] ii) Biotransformation—The biotransformation of the phenolic substrate stream might be carried out in a fed-batch bioprocess using Azotobacter strains engineered to specifically and optimally convert specific lignin-derived phenolic substrates to the final product, such as catechol. Corn steep liquor might be used the base medium used in the biotransformations. The phenolic stream might be introduced in fed-batch mode, at concentrations that will be tolerated by the strains.

[0221] iii) Product separation—The product, such as catechol, might be purified from the aqueous culture broths using standard chemical separation methods such as liquid-liquid extractions (LLE) with solvents of varying polarities applied in a sequential manner.

[0222] Additional examples of designed biochemical routes to aromatic products are described below:

[0223] i) lignin-derived syringic acid might be converted to gallic acid via a 2-step biochemical conversion using aryl aldehyde oxidases and demethylases.

[0224] ii) Lignin-derived vanillin might be converted to protocatechuic acid via a 2-step biochemical conversion using aryl aldehyde oxidases and demethylases.

[0225] iii) Lignin-derived vanillin might be converted to catechol via a 3-step biochemical conversion using aryl aldehyde oxidases, aromatic decarboxylases, and demethylases.

[0226] iv) Lignin-derived 2-methoxytoluene might be converted to the urethane precursor 2,4-diaminotoluene via a 4-step biochemical conversion using demethylases, ferulate-5-hydroxylases, 2,4-nitrophenol oxidoreductases, and 2,4-nitrobenzene reductases.

[0227] In each case, the specific enzymes might be engineered into A. vinelandii or A. chroococcum strains, for example, and the process might be performed using unit operations similar to those described herein for the biochemical production of catechol.

[0228] FIG. 8 illustrates an example of a biochemical process for the production of vanillin from lignin oligomers, according to some embodiments. Vanillin can be used as a flavoring agent, and as a precursor for pharmaceuticals such as methyldopa. Synthetic vanillin, for example, can be produced from petroleum-derived guaiacol by reaction with glyoxylic acid. Vanillin, however, can also be produced from lignin-derived β-hydroxypropiovanillone (β-HPV) according to the process scheme indicated in FIG. 8. A 2-step biochemical route to vanillin from β-HPV can be achieved using the enzymes 2,4-dihydroxyacetophenone oxidoreductase, and vanillin dehydrogenase or carboxylic acid reductases, engineered into A. vinelandii.

[0229] FIG. 9 illustrates an example of a biochemical process for the production of 2,4-diaminotoluene from lignin oligomers, according to some embodiments. Toluene diisocyanate (TDI) can be used in the manufacture of polyurethanes. For example, 2,4-diaminotoluene (2,4-DAT) is the key precursor to TDI. Diaminotoluenes can be produced industrially by the sequential nitration of toluene with nitric acid, followed by the reduction of the dinitrotoluenes to the corresponding diaminotoluenes. Both nitration and reduction reactions yield mixtures of toluene isomers from which the 2,4-DAT isomer is purified by distillation. The conversion of lignin-derived 2-methoxytoluene to 2,4-DAT can be achieved according to the process scheme outlined in FIG. 9. 2-methoxytoluene can be converted to 2,4-DAT by A. vinelandii engineered with 4 enzymes to specifically demethylate, hydroxylate, nitrate and aminate methoxytoluene.

[0230] FIG. 10 illustrates process schemes for additional product targets that include ortho-cresol, salicylic acid, and aminosalicylic acid, for the production of valuable chemicals from lignin oligomers, according to some embodiments. These chemicals, as with the others, have traditionally been obtained from the problematic petrochemical processes. A few of the process schemes for producing these chemicals using the teachings herein, based on guaiacol or 2-methoxytoluene, are shown schematically in FIG. 10. Designed biochemical routes, combined with the remarkable phenolics-tolerance traits of Azotobacter strains are proposed for conversions of lignin structures to industrial and fine chemicals.

### Example 10

[0231] This example describes potential LigE-, LigF-, LigG-, and LigD-type polypeptides, and the genes encoding them. The potential polypeptides were identified using bioinformatic methods, such as those taught herein.

[0232] As described above, the query sequences in the initial pass for the LigE-type and LigF-type were Sphingomonas paucimobilis sequences, such as those discussed in Masai, E., et al. Likewise, the query sequences for the LigG-type and LigD-type were also Sphingomonas paucimobilis sequences, such as those discussed in Masai. The following sequences were used in the initial pass for all queries:

[0233] LigE, from Accession No BAA2032.1, is listed herein as SEQ ID NO:1 for the protein and SEQ ID NO:2 for the gene.

[0234] LigF, from Accession No BAA2031.1 (P30347.1), is listed herein as SEQ ID NO:513 for the protein and SEQ ID NO:514 for the gene.

[0235] LigG, from Accession No Q9Z339.2, is listed herein as SEQ ID NO:733 for the protein and SEQ ID NO:734 for the gene.

[0236] LigD, from Accession No Q01198.1, is listed herein as SEQ ID NO:777 for the protein and SEQ ID NO:778 for the gene.

[0237] The following sequences were used in a modified query to further refine the LigE-type and LigF-type, and the query sequences were the LigE-1 and LigF-2 that showed the surprising and unexpected results shown in FIG. 4:

[0238] LigE-1, from Accession No ABD26841.1, is listed herein as SEQ ID NO:101 for the protein and SEQ ID NO:102 for the gene.

[0239] LigF-2, from Accession No ABD27301.1, is listed herein as SEQ ID NO:541 for the protein and SEQ ID NO:542 for the gene.

[0240] Table 16 lists SEQ ID NOs:1-246, which are potential protein sequences of the LigE-type, as well as a respective gene sequence encoding the protein. Table 17 lists SEQ ID NOs:247-576, which are potential protein sequences of the LigF-type, as well as a respective gene sequence encoding the protein. Table 18 lists SEQ ID NOs:577-776, which are potential protein sequences of the LigG-type, as well as a respective gene sequence encoding the protein. Table 19 lists SEQ ID NOs: 777-976, which are potential protein sequences of the LigD-type, as well as a respective gene sequence encoding the protein.

[0241] Bioinformatic methods, such as those described herein, can be used to suggest an efficient order of experimentation to identify additional potential enzymes for use with the teachings provided herein. Moreover, mutations and amino acid substitutions can be used to test affects on enzyme activity to further understand the structure of the most active proteins with respect to the enzyme functions sought by teachings provided herein.

TABLE 16

| PROTEIN | GENE | GENBANK | | |
|---|---|---|---|---|
| SEQ ID | SEQ ID | ACCESSION | | |
| NO: | NO: | NO: | DESCRIPTION: | TYPE |
| 1 | 2 | BAA02032.1 | Sphingomonas paucimobilis | LIGE |
| 3 | 4 | BAJ11989.1 | beta-etherase [Sphingobium sp. SYK-6] | LIGE |
| 5 | 6 | EFV85608.1 | glutathione S-transferase domain-containing | LIGE |
| | | | protein [Achromobacter xylosoxidans C54] | |
| 7 | 8 | EFW42705.1 | predicted protein [Capsaspora owczarzaki ATCC | LIGE |
| 9 | 10 | EGE55257.1 | Glutathione S-transferase domain-containing | LIGE |
| | | | protein [Rhizobium etli CNPAF512] | |
| 11 | 12 | EGP48556.1 | glutathione S-transferase domain-containing | LIGE |
| | | | protein [Achromobacter xylosoxidans AXX-A] | |
| 13 | 14 | EGP57475.1 | lignin degradation protein [Agrobacterium | LIGE |
| 15 | 16 | EGU12703.1 | Glutathione S-transferase [Rhodotorula glutinis | LIGE |
| | | | ATCC 204091] | |
| 17 | 18 | EGU56510.1 | glutathione S-transferase domain-containing | LIGE |
| | | | protein [Vibrio tubiashii ATCC 19109] | |
| 19 | 20 | NP_053324.1 | hypothetical protein pTi-SAKURA_p086 | LIGE |
| | | | [Agrobacterium tumefaciens] >dbj\|BAA87709.1\| | |
| | | | tiorf84 [Agrobacterium tumefaciens] | |
| 21 | 22 | NP_108131.1 | lignin beta-ether hydrolase [Mesorhizobium loti | LIGE |
| | | | MAFF303099] >dbj\|BAB54276.1\|lignin beta- | |
| | | | ether hydrolase [Mesorhizobium loti | |
| 23 | 24 | NP_354140.2 | lignin degradation protein [Agrobacterium | LIGE |
| | | | tumefaciens str. C58] >gb\|AAK86925.2\|lignin | |
| | | | degradation protein [Agrobacterium tumefaciens | |
| 25 | 26 | NP_385269.1 | putative BETA-etherase (BETA-aryl ether | LIGE |
| | | | cleaving enzyme) protein [Sinorhizobium meliloti | |
| | | | 1021] >emb\|CAC45742.1\|Putative beta- | |
| | | | etherase (beta-aryl ether cleaving enzyme) | |
| | | | protein [Sinorhizobium meliloti 1021] | |
| | | | >gb\|AEG03720.1\|Glutathione S-transferase | |
| | | | domain protein [Sinorhizobium meliloti BL225C] | |
| | | | >gb\|AEH79753.1\|putative BETA-etherase | |
| | | | [symbol] | |
| 27 | 28 | NP_774067.1 | ligninase [Bradyrhizobium japonicum USDA 110] | LIGE |
| | | | >dbj\|BAC52692.1\|ligE [Bradyrhizobium | |
| | | | japonicum USDA 110] | |
| 29 | 30 | NP_949676.1 | putative lignin beta-ether hydrolase | LIGE |
| | | | [Rhodopseudomonas palustris CGA009] | |
| | | | >emb\|CAE29781.1\|putative lignin beta-ether | |
| 31 | 32 | P27457.3 | RecName: Full = Beta-etherase; AltName: | LIGE |
| | | | Full = Beta-aryl ether cleaving enzyme | |
| | | | >gb\|AAA25878.1\|beta-etherase [Sphingomonas | |
| | | | paucimobilis] >dbj\|BAA02032.1\|beta-etherase | |
| 33 | 34 | [symbol] P_003028922. [symbol] | hypothetical protein SCHCODRAFT_85860 | LIGE |
| | | | [Schizophyllum commune H4-8] | |
| | | | >gb\|EFI94019.1\|hypothetical protein | |
| 35 | 36 | [symbol] P_003030384. [symbol] | hypothetical protein SCHCODRAFT_57691 | LIGE |
| | | | [Schizophyllum commune H4-8] | |
| | | | >gb\|EFI95481.1\|hypothetical protein | |
| 37 | 38 | [symbol] P_003033715. [symbol] | hypothetical protein SCHCODRAFT_81614 | LIGE |
| | | | [Schizophyllum commune H4-8] | |
| | | | >gb\|EFI98812.1\|hypothetical protein | |
| 39 | 40 | [symbol] P_003041213. [symbol] | hypothetical protein NECHADRAFT_55532 | LIGE |
| | | | [Nectria haematococca mpVI 77-13-4] | |
| | | | >gb\|EEU35500.1\|hypothetical protein | |
| | | | NECHADRAFT_55532 [Nectria haematococca | |
| 41 | 42 | XP_382462.1 | hypothetical protein FG02286.1 [Gibberella zeae | LIGE |
| 43 | 44 | [symbol] P_001207860. [symbol] | putative glutathione S-transferase (GST) | LIGE |
| | | | [Bradyrhizobium sp. ORS278] | |
| | | | >emb\|CAL79645.1\|putative glutathione S- | |
| 45 | 46 | [symbol] P_001236206. [symbol] | glutathione S-transferase domain-containing | LIGE |
| | | | protein [Acidiphilium cryptum JF-5] | |
| | | | >gb\|ABQ32287.1\|Glutathione S-transferase, N- | |
| | | | terminal domain protein [Acidiphilium cryptum JF [symbol] | |
| 47 | 48 | [symbol] P_001237901. [symbol] | putative glutathione S-transferase | LIGE |
| | | | [Bradyrhizobium sp. BTAi1] >gb\|ABQ33995.1\| | |
| | | | putative glutathione S-transferase (GST) | |
| 49 | 50 | [symbol] P_001262153. [symbol] | hypothetical protein Swit_1652 [Sphingomonas | LIGE |
| | | | wittichii RW1] >gb\|ABQ68015.1\|hypothetical | |
| | | | protein Swit_1652 [Sphingomonas wittichii RW1] | |
| 51 | 52 | [symbol] P_001326465. [symbol] | glutathione S-transferase domain-containing | LIGE |
| | | | protein [Sinorhizobium medicae WSM419] | |
| | | | >gb\|ABR59630.1\|Glutathione S-transferase | |
| | | | domain [Sinorhizobium medicae WSM419] | |
| 53 | 54 | [symbol] P_001413220. [symbol] | glutathione S-transferase domain-containing | LIGE |
| | | | protein [Parvibaculum lavamentivorans DS-1] | |
| | | | >gb\|ABS63563.1\|Glutathione S-transferase | |
| | | | domain [Parvibaculum lavamentivorans DS-1] | |
| 55 | 56 | [symbol] P_001526182. [symbol] | glutathione S-transferase [Azorhizobium | LIGE |
| | | | caulinodans ORS 571] >dbj\|BAF89264.1\| | |
| | | | glutathione S-transferase [Azorhizobium | |
| 57 | 58 | [symbol] P_001616516. [symbol] | lignin degradation protein [Sorangium cellulosum | LIGE |
| | | | ‘So ce 56’] >emb\|CAN96036.1\|lignin | |
| | | | degradation protein [Sorangium cellulosum ‘So | |
| 59 | 60 | [symbol] P_001772944. [symbol] | glutathione S-transferase domain-containing | LIGE |
| | | | protein [Methylobacterium sp. 4-46] | |
| | | | >gb\|ACA20510.1\|Glutathione S-transferase | |
| 61 | 62 | [symbol] P_001833458. [symbol] | glutathione S-transferase domain-containing | LIGE |
| | | | protein [Beijerinckia indica subsp. indica ATCC | |
| | | | 9039] >gb\|ACB95969.1\|Glutathione S- | |
| | | | transferase domain [Beijerinckia indica subsp. | |
| 63 | 64 | [symbol] P_001977695. [symbol] | beta-aryl ether cleaving enzyme, lignin | LIGE |
| | | | degradation protein [Rhizobium etli CIAT 652] | |
| | | | >gb\|ACE90517.1\|beta-aryl ether cleaving | |
| | | | enzyme, lignin degradation protein [Rhizobium | |
| 65 | 66 | [symbol] P_001993784. [symbol] | glutathione S-transferase domain-containing | LIGE |
| | | | protein [Rhodopseudomonas palustris TIE-1] | |
| | | | >gb\|ACF03309.1\|Glutathione S-transferase | |
| | | | domain [Rhodopseudomonas palustris TIE-1] | |
| 67 | 68 | [symbol] P_002280598. [symbol] | glutathione S-transferase domain [Rhizobium | LIGE |
| | | | leguminosarum bv. trifolii WSM2304] | |
| | | | >gb\|ACI54372.1\|Glutathione S-transferase | |
| | | | domain [Rhizobium leguminosarum bv. trifolii | |
| 69 | 70 | [symbol] P_002290149. [symbol] | glutathione S-transferase [Oligotropha | LIGE |
| | | | carboxidovorans OM5] >ref\|YP_004631892.1\| | |
| | | | beta etherase [Oligotropha carboxidovorans | |
| | | | OM5] >gb\|ACI94284.1\|glutathione S- | |
| | | | transferase [Oligotropha carboxidovorans OM5] | |
| | | | >gb\|AEI02075.1\|putative beta etherase | |
| | | | [Oligotropha carboxidovorans OM4] | |
| | | | [symbol] | |
| 71 | 72 | [symbol] P_002362903. [symbol] | glutathione S-transferase domain-containing | LIGE |
| | | | protein [Methylocella silvestris BL2] | |
| | | | >gb\|ACK51541.1\|glutathione S-transferase | |
| 73 | 74 | [symbol] P_002502105. [symbol] | glutathione S-transferase domain-containing | LIGE |
| | | | protein [Methylobacterium nodulans ORS 2060] | |
| | | | >gb\|ACL61802.1\|Glutathione S-transferase | |
| | | | domain protein [Methylobacterium nodulans | |
| 75 | 76 | [symbol] P_002549116. [symbol] | lignin degradation protein [Agrobacterium vitis | LIGE |
| | | | S4] >gb\|ACM36110.1\|lignin degradation protein | |
| | | | [Agrobacterium vitis S4] | |
| 77 | 78 | [symbol] P_002797805. [symbol] | glutathione S-transferase-like protein | LIGE |
| | | | [Azotobacter vinelandii DJ] >gb\|ACO76830.1\| | |
| | | | Glutathione S-transferase-like protein | |
| 79 | 80 | [symbol] P_002825455. [symbol] | putative lignin beta-ether hydrolase | LIGE |
| | | | [Sinorhizobium fredii NGR234] | |
| | | | >gb\|ACP24702.1\|putative lignin beta-ether | |
| 81 | 82 | [symbol] P_002975056. [symbol] | glutathione S-transferase domain protein | LIGE |
| | | | [Rhizobium leguminosarum bv. trifolii WSM1325] | |
| | | | >gb\|ACS55517.1\|Glutathione S-transferase | |
| | | | domain protein [Rhizobium leguminosarum bv. | |
| 83 | 84 | [symbol] P_004278359. [symbol] | lignin degradation protein [Agrobacterium sp. | LIGE |
| | | | H13-3] >gb\|ADY64039.1\|lignin degradation | |
| | | | protein [Agrobacterium sp. H13-3] | |
| 85 | 86 | [symbol] P_004285673. [symbol] | putative beta-etherase [Acidiphilium multivorum | LIGE |
| | | | AIU301] >dbj\|BAJ82791.1\|putative beta- | |
| | | | etherase [Acidiphilium multivorum AIU301] | |
| 87 | 88 | [symbol] P_004378290. [symbol] | glutathione S-transferase-like protein | LIGE |
| | | | [Pseudomonas mendocina NK-01] | |
| | | | >gb\|AEB56538.1\|glutathione S-transferase-like | |
| 89 | 90 | [symbol] P_004533906. [symbol] | glutathione S-transferase-like protein | LIGE |
| | | | [Novosphingobium sp. PP1Y] | |
| | | | >emb\|CCA92088.1\|glutathione S-transferase- | |
| 91 | 92 | [symbol] P_004548326. [symbol] | glutathione S-transferase domain-containing | LIGE |
| | | | protein [Sinorhizobium meliloti AK83] | |
| | | | >gb\|AEG52712.1\|Glutathione S-transferase | |
| 93 | 94 | [symbol] P_004613710. [symbol] | glutathione S-transferase domain-containing | LIGE |
| | | | protein [Mesorhizobium opportunistum | |
| | | | WSM2075] >gb\|AEH89616.1\|Glutathione S- | |
| | | | transferase domain protein [Mesorhizobium | |
| 95 | 96 | YP_269568.1 | putative lignin beta-etherase [Colwellia | LIGE |
| | | | psychrerythraea 34H] >gb\|AAZ24120.1\|putative | |
| | | | lignin beta-etherase [Colwellia psychrerythraea | |
| 97 | 98 | YP_469001.1 | beta-aryl ether cleaving enzyme, lignin | LIGE |
| | | | degradation protein [Rhizobium etli CFN 42] | |
| | | | >gb\|ABC90274.1\|beta-aryl ether cleaving | |
| | | | enzyme, lignin degradation protein [Rhizobium | |
| 99 | 100 | YP_487746.1 | glutathione S-transferase-like protein | LIGE |
| | | | [Rhodopseudomonas palustris HaA2] | |
| | | | >gb\|ABD08835.1\|Glutathione S-transferase-like | |
| 101 | 102 | YP_497675.1 | glutathione S-transferase-like protein | LIGE |
| | | | [Novosphingobium aromaticivorans DSM 12444] | |
| | | | >gb\|ABD26841.1\|glutathione S-transferase-like | |
| | | | protein [Novosphingobium aromaticivorans DSM | |
| 103 | 104 | YP_533979.1 | glutathione S-transferase-like protein | LIGE |
| | | | [Rhodopseudomonas palustris BisB18] | |
| | | | >gb\|ABD89660.1\|glutathione S-transferase-like | |
| 105 | 106 | YP_574731.1 | glutathione S-transferase-like protein | LIGE |
| | | | [Chromohalobacter salexigens DSM 3043] | |
| | | | >gb\|ABE60032.1\|glutathione S-transferase-like | |
| | | | protein [Chromohalobacter salexigens DSM | |
| 107 | 108 | YP_723508.1 | glutathione S-transferase-like protein | LIGE |
| | | | [Trichodesmium erythraeum IMS101] | |
| | | | >gb\|ABG53035.1\|glutathione S-transferase-like | |
| 109 | 110 | YP_767183.1 | etherase [Rhizobium leguminosarum bv. viciae | LIGE |
| | | | 3841] >emb\|CAK07074.1\|putative etherase | |
| | | | [Rhizobium leguminosarum bv. viciae 3841] | |
| 111 | 112 | YP_783091.1 | glutathione S-transferase [Rhodopseudomonas | LIGE |
| | | | palustris BisA53] >gb\|ABJ08111.1\|Glutathione | |
| | | | S-transferase [Rhodopseudomonas palustris | |
| 113 | 114 | YP_915395.1 | glutathione S-transferase domain-containing | LIGE |
| | | | protein [Paracoccus denitrificans PD1222] | |
| | | | >gb\|ABL69699.1\|Glutathione S-transferase, N- | |
| | | | terminal domain [Paracoccus denitrificans | |
| 115 | 116 | ZP_02146530. [symbol] | putative beta-etherase (beta-aryl ether cleaving | LIGE |
| | | | enzyme) protein [Phaeobacter gallaeciensis | |
| | | | BS107] >gb\|EDQ11875.1\|putative beta- | |
| | | | etherase (beta-aryl ether cleaving enzyme) | |
| 117 | 118 | ZP_02149699. [symbol] | putative beta-etherase (beta-aryl ether cleaving | LIGE |
| | | | enzyme) protein [Phaeobacter gallaeciensis | |
| | | | 2.10] >gb\|EDQ08644.1\|putative beta-etherase | |
| | | | (beta-aryl ether cleaving enzyme) protein | |
| 119 | 120 | ZP_02166231. [symbol] | putative beta-etherase (beta-aryl ether cleaving | LIGE |
| | | | enzyme) protein [Hoeflea phototrophica DFL-43] | |
| | | | >gb\|EDQ33834.1\|putative beta-etherase (beta- | |
| | | | aryl ether cleaving enzyme) protein [Hoeflea | |
| 121 | 122 | ZP_02190934. [symbol] | glutathione S-transferase-like protein [alpha | LIGE |
| | | | proteobacterium BAL199] >gb\|EDP62276.1\| | |
| | | | glutathione S-transferase-like protein [alpha | |
| 123 | 124 | ZP_03503368. [symbol] | Glutathione S-transferase domain [Rhizobium | LIGE |
| 125 | 126 | ZP_03507162. [symbol] | Glutathione S-transferase domain [Rhizobium | LIGE |
| 127 | 128 | ZP_03513891. [symbol] | Glutathione S-transferase domain [Rhizobium | LIGE |
| 129 | 130 | ZP_03519388. [symbol] | Glutathione S-transferase domain [Rhizobium | LIGE |
| 131 | 132 | ZP_03520502. [symbol] | putative etherase [Rhizobium etli GR56] | LIGE |
| 133 | 134 | ZP_05084767. [symbol] | glutathione S-transferase, N-terminal domain | LIGE |
| | | | [Pseudovibrio sp. JE062] >gb\|EEA94709.1\| | |
| | | | glutathione S-transferase, N-terminal domain | |
| 135 | 136 | ZP_06688745. [symbol] | lignin degradation protein [Achromobacter | LIGE |
| | | | piechaudii ATCC 43553] >gb\|EFF74366.1\|lignin | |
| | | | degradation protein [Achromobacter piechaudii | |
| 137 | 138 | ZP_06898146. [symbol] | glutathione S-transferase family protein | LIGE |
| | | | [Roseomonas cervicalis ATCC 49957] | |
| | | | >gb\|EFH10151.1\|glutathione S-transferase | |
| | | | family protein [Roseomonas cervicalis ATCC | |
| 139 | 140 | ZP_07027473. [symbol] | Glutathione S-transferase domain protein [Afipia | LIGE |
| | | | sp. 1NLS2] >gb\|EFI51229.1\|Glutathione S- | |
| | | | transferase domain protein [Afipia sp. 1NLS2] | |
| 141 | 142 | ZP_07373940. [symbol] | beta-etherase [Ahrensia sp. R2A130] | LIGE |
| | | | >gb\|EFL90585.1\|beta-etherase [Ahrensia sp. | |
| 143 | 144 | ZP_08328512. [symbol] | Glutathione S-transferase [gamma | LIGE |
| | | | proteobacterium IMCC1989] >gb\|EGG95341.1\| | |
| | | | Glutathione S-transferase [gamma | |
| 145 | 146 | ZP_08529965. [symbol] | lignin degradation protein [Agrobacterium sp. | LIGE |
| | | | ATCC 31749] >gb\|EGL63395.1\|lignin | |
| | | | degradation protein [Agrobacterium sp. ATCC | |
| 147 | 148 | ZP_08627134. [symbol] | lignin beta-ether hydrolase [Bradyrhizobiaceae | LIGE |
| | | | bacterium SG-6C] >gb\|EGP10168.1\|lignin beta- | |
| | | | ether hydrolase [Bradyrhizobiaceae bacterium | |
| 149 | 150 | ZP_08631370. [symbol] | Glutathione S-transferase domain-containing | LIGE |
| | | | protein [Acidiphilium sp. PM] >gb\|EGO96849.1\| | |
| | | | Glutathione S-transferase domain-containing | |
| 151 | 152 | ZP_08634908. [symbol] | Glutathione S-transferase domain-containing | LIGE |
| | | | protein [Acidiphilium sp. PM] >gb\|EGO93307.1\| | |
| | | | Glutathione S-transferase domain-containing | |
| 153 | 154 | ZP_08635074. [symbol] | glutathione S-transferase domain-containing | LIGE |
| | | | protein [Halomonas sp. TD01] >gb\|EGP21558.1\| | |
| | | | glutathione S-transferase domain-containing | |
| 155 | 156 | EGN93792.1 | hypothetical protein SERLA73DRAFT_115219 | LIGE |
| | | | [Serpula lacrymans var. lacrymans S7.3] | |
| | | | >gb\|EGO19163.1\|hypothetical protein | |
| | | | SERLADRAFT_453680 [Serpula lacrymans var. | |
| 157 | 158 | EGN94392.1 | hypothetical protein SERLA73DRAFT_188253 | LIGE |
| | | | [Serpula lacrymans var. lacrymans S7.3] | |
| | | | >gb\|EGO19875.1\|hypothetical protein | |
| | | | SERLADRAFT_478300 [Serpula lacrymans var. | |
| 159 | 160 | EGN96317.1 | hypothetical protein SERLA73DRAFT_186005 | LIGE |
| | | | [Serpula lacrymans var. lacrymans S7.3] | |
| | | | >gb\|EGO21854.1\|hypothetical protein | |
| | | | SERLADRAFT_474829 [Serpula lacrymans var. | |
| 161 | 162 | EGN96924.1 | hypothetical protein SERLA73DRAFT_185168 | LIGE |
| | | | [Serpula lacrymans var. lacrymans S7.3] | |
| | | | >gb\|EGO22516.1\|hypothetical protein | |
| | | | SERLADRAFT_473468 [Serpula lacrymans var. | |
| 163 | 164 | EGO00367.1 | hypothetical protein SERLA73DRAFT_107446 | LIGE |
| | | | [Serpula lacrymans var. lacrymans S7.3] | |
| | | | >gb\|EGO25928.1\|hypothetical protein | |
| | | | SERLADRAFT_415302 [Serpula lacrymans var. | |
| 165 | 166 | [symbol] P_001215222. [symbol] | conserved hypothetical protein [Aspergillus | LIGE |
| | | | terreus NIH2624] >gb\|EAU33805.1\|conserved | |
| | | | hypothetical protein [Aspergillus terreus | |
| 167 | 168 | [symbol] P_001823934. [symbol] | hypothetical protein AOR_1_322094 [Aspergillus | LIGE |
| | | | oryzae RIB40] >dbj\|BAE62801.1\|unnamed | |
| | | | protein product [Aspergillus oryzae RIB40] | |
| 169 | 170 | [symbol] P_001839188. [symbol] | hypothetical protein CC1G_07903 [Coprinopsis | LIGE |
| | | | cinerea okayama7#130] >gb\|EAU82621.1\| | |
| | | | hypothetical protein CC1G_07903 [Coprinopsis | |
| 171 | 172 | [symbol] P_001885678. [symbol] | predicted protein [Laccaria bicolor S238N-H82] | LIGE |
| | | | >gb\|EDR03530.1\|predicted protein [Laccaria | |
| | | | bicolor S238N-H82] | |
| 173 | 174 | [symbol] P_002152364. [symbol] | conserved hypothetical protein [Penicillium | LIGE |
| | | | marneffei ATCC 18224] >gb\|EEA19427.1\| | |
| | | | conserved hypothetical protein [Penicillium | |
| 175 | 176 | [symbol] P_002380998. [symbol] | conserved hypothetical protein [Aspergillus | LIGE |
| | | | flavus NRRL3357] >gb\|EED49097.1\|conserved | |
| | | | hypothetical protein [Aspergillus flavus | |
| 177 | 178 | [symbol] P_002392962. [symbol] | hypothetical protein MPER_07394 | LIGE |
| | | | [Moniliophthora perniciosa FA553] | |
| | | | >gb\|EEB93892.1\|hypothetical protein | |
| 179 | 180 | [symbol] P_002468854. [symbol] | predicted protein [Postia placenta Mad-698-R] | LIGE |
| | | | >gb\|EED86077.1\|predicted protein [Postia | |
| | | | placenta Mad-698-R] | |
| 181 | 182 | [symbol] P_002472522. [symbol] | predicted protein [Postia placenta Mad-698-R] | LIGE |
| | | | >gb\|EED82308.1\|predicted protein [Postia | |
| | | | placenta Mad-698-R] | |
| 183 | 184 | [symbol] P_002557398. [symbol] | Pc12g05530 [Penicillium chrysogenum | LIGE |
| | | | Wisconsin 54-1255] >emb\|CAP80180.1\| | |
| | | | Pc12g05530 [Penicillium chrysogenum | |
| 185 | 186 | [symbol] P_003026159. [symbol] | hypothetical protein SCHCODRAFT_12387 | LIGE |
| | | | [Schizophyllum commune H4-8] | |
| | | | >gb\|EFI91256.1\|hypothetical protein | |
| 187 | 188 | [symbol] P_003028923. [symbol] | hypothetical protein SCHCODRAFT_111982 | LIGE |
| | | | [Schizophyllum commune H4-8] | |
| | | | >gb\|EFI94020.1\|hypothetical protein | |
| 189 | 190 | [symbol] P_003890246. [symbol] | Glutathione S-transferase domain-containing | LIGE |
| | | | protein [Cyanothece sp. PCC 7822] | |
| | | | >gb\|ADN16971.1\|Glutathione S-transferase | |
| 191 | 192 | [symbol] P_003896657. [symbol] | glutathione S-transferase-like [Halomonas | LIGE |
| | | | elongata DSM 2581] >emb\|CBV41472.1\| | |
| | | | glutathione S-transferase-like [Halomonas | |
| 193 | 194 | [symbol] P_003980382. [symbol] | glutathione S-transferase [Achromobacter | LIGE |
| | | | xylosoxidans A8] >gb\|ADP17667.1\|glutathione | |
| | | | S-transferase, N-terminal domain protein 4 | |
| 195 | 196 | [symbol] P_004110838. [symbol] | glutathione S-transferase domain-containing | LIGE |
| | | | protein [Rhodopseudomonas palustris DX-1] | |
| | | | >gb\|ADU46105.1\|Glutathione S-transferase | |
| | | | domain [Rhodopseudomonas palustris DX-1] | |
| 197 | 198 | [symbol] P_004143867. [symbol] | glutathione S-transferase [Mesorhizobium ciceri | LIGE |
| | | | biovar biserrulae WSM1271] >gb\|ADV13817.1\| | |
| | | | Glutathione S-transferase domain | |
| | | | [Mesorhizobium ciceri biovar biserrulae | |
| 199 | 200 | ZP_01102591. [symbol] | conserved hypothetical protein [Congregibacter | LIGE |
| | | | litoralis KT71] >gb\|EAQ98305.1\|conserved | |
| | | | hypothetical protein [Congregibacter litoralis | |
| 201 | 202 | AAA87183.1 | auxin-induced protein [Vigna radiata] | LIGE |
| 203 | 204 | AAG34797.1 | glutathione S-transferase GST 7 [Glycine max] | LIGE |
| 205 | 206 | AAO69664.1 | glutathione S-transferase [Phaseolus acutifolius] | LIGE |
| 207 | 208 | ACU24385.1 | unknown [Glycine max] | LIGE |
| 209 | 210 | ADP99065.1 | glutathione S-transferase [Marinobacter | LIGE |
| 211 | 212 | ADY82158.1 | putative glutathione S-transferase [Acinetobacter | LIGE |
| | | | calcoaceticus PHEA-2] | |
| 213 | 214 | BAA77215.1 | beta-etherase [Sphingomonas paucimobilis] | LIGE |
| 215 | 216 | [symbol] P_001839584. [symbol] | hypothetical protein CC1G_12612 [Coprinopsis | LIGE |
| | | | cinerea okayama7#130] >gb\|EAU82225.1\| | |
| | | | hypothetical protein CC1G_12612 [Coprinopsis | |
| 217 | 218 | [symbol] P_002336443. [symbol] | predicted protein [Populus trichocarpa] | LIGE |
| | | | >gb\|EEE73479.1\|predicted protein [Populus | |
| 219 | 220 | [symbol] P_003028624. [symbol] | hypothetical protein SCHCODRAFT_59314 | LIGE |
| | | | [Schizophyllum commune H4-8] | |
| | | | >gb\|EFI93721.1\|hypothetical protein | |
| 221 | 222 | XP_456365.1 | DEHA2A00660p [Debaryomyces hansenii | LIGE |
| | | | CBS767] >emb\|CAG84310.1\|DEHA2A00660p | |
| | | | [Debaryomyces hansenii] | |
| 223 | 224 | XP_572781.1 | hypothetical protein [Cryptococcus neoformans | LIGE |
| | | | var. neoformans JEC21] >ref\|XP_773999.1\| | |
| | | | hypothetical protein CNBH0460 [Cryptococcus | |
| | | | neoformans var. neoformans B-3501A] | |
| | | | >gb\|EAL19352.1\|hypothetical protein | |
| | | | CNBH0460 [Cryptococcus neoformans var. | |
| | | | neoformans B-3501A] >gb\|AAW45474.1\| | |
| 225 | 226 | [symbol] P_001236206. [symbol] | glutathione S-transferase domain-containing | LIGE |
| | | | protein [Acidiphilium cryptum JF-5] | |
| | | | >gb\|ABQ32287.1\|Glutathione S-transferase, N- | |
| | | | terminal domain protein [Acidiphilium cryptum JF [symbol] | |
| 227 | 228 | [symbol] P_001237901. [symbol] | putative glutathione S-transferase | LIGE |
| | | | [Bradyrhizobium sp. BTAi1] >gb\|ABQ33995.1\| | |
| | | | putative glutathione S-transferase (GST) | |
| 229 | 230 | [symbol] P_001262153. [symbol] | hypothetical protein Swit_1652 [Sphingomonas | LIGE |
| | | | wittichii RW1] >gb\|ABQ68015.1\|hypothetical | |
| | | | protein Swit_1652 [Sphingomonas wittichii RW1] | |
| 231 | 232 | [symbol] P_001326465. [symbol] | glutathione S-transferase domain-containing | LIGE |
| | | | protein [Sinorhizobium medicae WSM419] | |
| | | | >gb\|ABR59630.1\|Glutathione S-transferase | |
| | | | domain [Sinorhizobium medicae WSM419] | |
| 233 | 234 | [symbol] P_001413220. [symbol] | glutathione S-transferase domain-containing | LIGE |
| | | | protein [Parvibaculum lavamentivorans DS-1] | |
| | | | >gb\|ABS63563.1\|Glutathione S-transferase | |
| | | | domain [Parvibaculum lavamentivorans DS-1] | |
| 235 | 236 | [symbol] P_001526182. [symbol] | glutathione S-transferase [Azorhizobium | LIGE |
| | | | caulinodans ORS 571] >dbj\|BAF89264.1\| | |
| | | | glutathione S-transferase [Azorhizobium | |
| 237 | 238 | YP_171459.1 | glutathione S-transferase [Synechococcus | LIGE |
| | | | elongatus PCC 6301] >ref\|YP_399807.1\| | |
| | | | glutathione S-transferase [Synechococcus | |
| | | | elongatus PCC 7942] >dbj\|BAD78939.1\| | |
| | | | glutathione S-transferase [Synechococcus | |
| | | | elongatus PCC 6301] >gb\|ABB56820.1\| | |
| 239 | 240 | YP_322424.1 | glutathione S-transferase-like protein [Anabaena | LIGE |
| | | | variabilis ATCC 29413] >gb\|ABA21529.1\| | |
| | | | Glutathione S-transferase-like protein | |
| 241 | 242 | ZP_01625805. [symbol] | glutathione S-transferase, putative [marine | LIGE |
| | | | gamma proteobacterium HTCC2080] | |
| | | | >gb\|EAW41324.1\|glutathione S-transferase, | |
| | | | putative [marine gamma proteobacterium | |
| 243 | 244 | ZP_01631145. [symbol] | Glutathione S-transferase-like protein [Nodularia | LIGE |
| | | | spumigena CCY9414] >gb\|EAW44220.1\| | |
| | | | Glutathione S-transferase-like protein [Nodularia | |
| 245 | 246 | ZP_06057261. [symbol] | glutathione S-transferase [Acinetobacter | LIGE |
| | | | calcoaceticus RUH2202] >gb\|EEY78560.1\| | |
| | | | glutathione S-transferase [Acinetobacter | |

[symbol]

indicates data missing or illegible when filed

TABLE 17

| PROTEIN | GENE | GENBANK | | |
|---|---|---|---|---|
| SEQ ID | SEQ ID | ACCESSION | | |
| NO: | NO: | NO: | DESCRIPTION: | TYPE |
| 247 | 248 | AAB65163.1 | glutathione S-transferase, class-phi | LigF |
| | | | [Solanum commersonii] | |
| 249 | 250 | AAG34850.1 | glutathione S-transferase GST 42 [Zea | LigF |
| | | | mays] | |
| 251 | 252 | AAK98535.1 | putative glutathione S-transferase | LigF |
| | | | OsGSTU7 [Oryza sativa Japonica | |
| | | | Group] | |
| 253 | 254 | AAL61612.1 | glutathione S-transferase [Allium cepa] | LigF |
| 255 | 256 | ABE86679.1 | Intracellular chloride channel [Medicago | LigF |
| | | | truncatula] | |
| 257 | 258 | ABE86683.1 | Intracellular chloride channel [Medicago | LigF |
| | | | truncatula] | |
| 259 | 260 | ABQ96853.1 | glutathione S-transferase [Solanum | LigF |
| | | | tuberosum] | |
| 261 | 262 | ACF15452.1 | glutathione-S-transferase | LigF |
| | | | [Phanerochaete chrysosporium] | |
| 263 | 264 | ACG44597.1 | glutathione S-transferase GSTU6 [Zea | LigF |
| | | | mays] | |
| 265 | 266 | ACJ86045.1 | unknown [Medicago truncatula] | LigF |
| 267 | 268 | ACO15091.1 | Probable maleylacetoacetate isomerase | LigF |
| | | | 2 [Caligus clemensi] | |
| 269 | 270 | ADB11335.1 | phi class glutathione transferase GSTF7 | LigF |
| | | | [Populus trichocarpa] | |
| 271 | 272 | BAB70616.1 | glutathione S-transferase [Medicago | LigF |
| | | | sativa] | |
| 273 | 274 | BAF56180.1 | glutathione S-transferase [Allium cepa] | LigF |
| 275 | 276 | BAJ90004.1 | predicted protein [Hordeum vulgare | LigF |
| | | | subsp. vulgare] >dbj\|BAJ99460.1\| | |
| | | | predicted protein [Hordeum vulgare | |
| | | | subsp. vulgare] | |
| 277 | 278 | CAI51314.2 | glutathione S-transferase GST1 | LigF |
| | | | [Capsicum chinense] | |
| 279 | 280 | EAY79299.1 | hypothetical protein OsI_34425 [Oryza | LigF |
| | | | sativa Indica Group] | |
| 281 | 282 | EAZ16758.1 | hypothetical protein OsJ_32234 [Oryza | LigF |
| | | | sativa Japonica Group] | |
| 283 | 284 | EEC67342.1 | hypothetical protein OsI_34397 [Oryza | LigF |
| | | | sativa Indica Group] | |
| 285 | 286 | EFV87279.1 | glutathione S-transferase | LigF |
| | | | [Achromobacter xylosoxidans C54] | |
| 287 | 288 | EGN92742.1 | hypothetical protein | LigF |
| | | | SERLA73DRAFT_190579 [Serpula | |
| | | | lacrymans var. lacrymans S7.3] | |
| | | | >gb\|EGO26403.1\|hypothetical protein | |
| | | | SERLADRAFT_463437 [Serpula | |
| | | | lacrymans var. lacrymans S7.9] | |
| 289 | 290 | EGU75635.1 | hypothetical protein FOXB_13869 | LigF |
| | | | [Fusarium oxysporum Fo5176] | |
| 291 | 292 | NP_001065115.1 | Os10g0525600 [Oryza sativa Japonica | LigF |
| | | | Group] >gb\|AAM12493.1\|AC074232_20 | |
| | | | putative glutathione S-transferase [Oryza | |
| | | | sativa Japonica Group] | |
| | | | >dbj\|BAF27029.1\|Os10g0525600 | |
| | | | [Oryza sativa Japonica Group] | |
| 293 | 294 | NP_001065118.1 | Os10g0527400 [Oryza sativa Japonica | LigF |
| | | | Group] >gb\|AAM12310.1\|AC091680_11 | |
| | | | putative glutathione S-transferase [Oryza | |
| | | | sativa Japonica Group] | |
| | | | >gb\|AAM12478.1\|AC074232_5 putative | |
| | | | glutathione S-transferase [Oryza sativa | |
| | | | Japonica Group] >gb\|AAP54729.1\| | |
| | | | glutathione S-transferase GSTU6, | |
| | | | putative, expressed [Oryza sativa | |
| | | | Japonica Group] >dbj\|BAF27032.1\| | |
| | | | Os10g0527400 [Oryza sativa Japonica | |
| | | | Group] >gb\|EEE51298.1\|hypothetical | |
| | | | protein OsJ_32225 [Oryza sativa | |
| | | | Japonica Group] | |
| 295 | 296 | NP_001065126.1 | Os10g0529300 [Oryza sativa Japonica | LigF |
| | | | Group] >gb\|AAK98546.1\|AF402805_1 | |
| | | | putative glutathione S-transferase | |
| | | | OsGSTU18 [Oryza sativa Japonica | |
| | | | Group] >gb\|AAM12302.1\|AC091680_3 | |
| | | | putative glutathione S-transferase [Oryza | |
| | | | sativa Japonica Group] | |
| | | | >gb\|AAM94529.1\|putative glutathione S- | |
| | | | transferase [Oryza sativa Japonica | |
| | | | Group] >gb\|AAP54753.1\|glutathione S- | |
| | | | transferase GSTU6, putative, expressed | |
| | | | [Oryza sativa Japonica Group] | |
| | | | >dbj\|BAF27040.1\|Os10g0529300 | |
| | | | [Oryza sativa Japonica Group] | |
| | | | >gb\|EAY79288.1\|hypothetical protein | |
| | | | OsI_34414 [Oryza sativa Indica Group] | |
| | | | >dbj\|BAG87628.1\|unnamed protein | |
| | | | product [Oryza sativa Japonica Group] | |
| | | | >dbj\|BAG97643.1\|unnamed protein | |
| | | | product [Oryza sativa Japonica Group] | |
| | | | >dbj\|BAG87189.1\|unnamed protein | |
| | | | product [Oryza sativa Japonica Group] | |
| 297 | 298 | NP_001065132.1 | Os10g0529900 [Oryza sativa Japonica | LigF |
| | | | Group] >gb\|AAM12331.1\|AC091680_32 | |
| | | | putative glutathione S-transferase [Oryza | |
| | | | sativa Japonica Group] | |
| | | | >gb\|AAM94517.1\|putative glutathione S- | |
| | | | transferase [Oryza sativa Japonica | |
| | | | Group] >gb\|AAP54759.1\|glutathione S- | |
| | | | transferase GSTU6, putative [Oryza | |
| | | | sativa Japonica Group] | |
| | | | >dbj\|BAF27046.1\|Os10g0529900 | |
| | | | [Oryza sativa Japonica Group] | |
| | | | >gb\|EAZ16763.1\|hypothetical protein | |
| | | | OsJ_32239 [Oryza sativa Japonica | |
| | | | Group] | |
| 299 | 300 | NP_001105627.1 | LOC542632 [Zea mays] | LigF |
| | | | >gb\|AAG34835.1\|AF244692_1 | |
| | | | glutathione S-transferase GST 27 [Zea | |
| | | | mays] >gb\|ACF85142.1\|unknown [Zea | |
| | | | mays] | |
| 301 | 302 | NP_001152229.1 | glutathione S-transferase GSTU6 [Zea | LigF |
| | | | mays] >gb\|ACG46501.1\|glutathione S- | |
| | | | transferase GSTU6 [Zea mays] | |
| 303 | 304 | NP_384409.1 | putative glutathione S-transferase | LigF |
| | | | protein [Sinorhizobium meliloti 1021] | |
| | | | >ref\|YP_004550950.1\|glutathione S- | |
| | | | transferase domain-containing protein | |
| | | | [Sinorhizobium meliloti AK83] | |
| | | | >emb\|CAC41740.1\|Putative glutathione | |
| | | | S-transferase [Sinorhizobium meliloti | |
| | | | 1021] >gb\|AEG06303.1\|Glutathione S- | |
| | | | transferase domain protein | |
| | | | [Sinorhizobium meliloti BL225C] | |
| | | | >gb\|AEG55336.1\|Glutathione S- | |
| | | | transferase domain protein | |
| | | | [Sinorhizobium meliloti AK83] | |
| | | | >gb\|AEH81005.1\|putative glutathione S- | |
| | | | transferase protein [Sinorhizobium | |
| | | | meliloti SM11] | |
| 305 | 306 | XP_001555922.1 | hypothetical protein BC1G_05597 | LigF |
| | | | [Botryotinia fuckeliana B05.10] | |
| | | | >gb\|EDN24875.1\|hypothetical protein | |
| | | | BC1G_05597 [Botryotinia fuckeliana | |
| | | | B05.10] | |
| 307 | 308 | XP_001805855.1 | hypothetical protein SNOG_15716 | LigF |
| | | | [Phaeosphaeria nodorum SN15] | |
| | | | >gb\|EAT76811.2\|hypothetical protein | |
| | | | SNOG_15716 [Phaeosphaeria nodorum | |
| | | | SN15] | |
| 309 | 310 | XP_002321320.1 | predicted protein [Populus trichocarpa] | LigF |
| | | | >gb\|EEE99635.1\|predicted protein | |
| | | | [Populus trichocarpa] | |
| 311 | 312 | XP_002455784.1 | hypothetical protein | LigF |
| | | | SORBIDRAFT_03g025210 [Sorghum | |
| | | | bicolor] >gb\|EES00904.1\|hypothetical | |
| | | | protein SORBIDRAFT_03g025210 | |
| | | | [Sorghum bicolor] | |
| 313 | 314 | XP_002467606.1 | hypothetical protein | LigF |
| | | | SORBIDRAFT_01g030860 [Sorghum | |
| | | | bicolor] >gb\|EER94604.1\|hypothetical | |
| | | | protein SORBIDRAFT_01g030860 | |
| | | | [Sorghum bicolor] | |
| 315 | 316 | XP_002734706.1 | PREDICTED: ganglioside-induced | LigF |
| | | | differentiation-associated protein 1-like | |
| | | | [Saccoglossus kowalevskii] | |
| 317 | 318 | XP_002734707.1 | PREDICTED: ganglioside-induced | LigF |
| | | | differentiation-associated protein 1-like | |
| | | | [Saccoglossus kowalevskii] | |
| 319 | 320 | XP_002737947.1 | PREDICTED: Glutathione S-Transferase | LigF |
| | | | family member (gst-42)-like | |
| | | | [Saccoglossus kowalevskii] | |
| 321 | 322 | XP_002989538.1 | hypothetical protein | LigF |
| | | | SELMODRAFT_184606 [Selaginella | |
| | | | moellendorffii] >gb\|EFJ09414.1\| | |
| | | | hypothetical protein | |
| | | | SELMODRAFT_184606 [Selaginella | |
| | | | moellendorffii] | |
| 323 | 324 | XP_003146962.1 | glutathione S-transferase domain- | LigF |
| | | | containing protein [Loa loa] | |
| | | | >gb\|EFO17107.1\|glutathione S- | |
| | | | transferase domain-containing protein | |
| | | | [Loa loa] | |
| 325 | 326 | YP_001187408.1 | glutathione S-transferase domain- | LigF |
| | | | containing protein [Pseudomonas | |
| | | | mendocina ymp] >gb\|ABP84676.1\| | |
| | | | Glutathione S-transferase, N-terminal | |
| | | | domain protein [Pseudomonas | |
| | | | mendocina ymp] | |
| 327 | 328 | YP_001239734.1 | glutathione S-transferase domain- | LigF |
| | | | containing protein [Bradyrhizobium sp. | |
| | | | BTAi1] >gb\|ABQ35828.1\|putative | |
| | | | glutathione S-transferase enzyme with | |
| | | | thioredoxin-like domain [Bradyrhizobium | |
| | | | sp. BTAi1] | |
| 329 | 330 | YP_001261939.1 | glutathione S-transferase domain- | LigF |
| | | | containing protein [Sphingomonas | |
| | | | wittichii RW1] >gb\|ABQ67801.1\| | |
| | | | Glutathione S-transferase, N-terminal | |
| | | | domain [Sphingomonas wittichii RW1] | |
| 331 | 332 | YP_001263066.1 | glutathione S-transferase domain- | LigF |
| | | | containing protein [Sphingomonas | |
| | | | wittichii RW1] >gb\|ABQ68928.1\| | |
| | | | Glutathione S-transferase, N-terminal | |
| | | | domain [Sphingomonas wittichii RW1] | |
| 333 | 334 | YP_001414366.1 | glutathione S-transferase domain- | LigF |
| | | | containing protein [Parvibaculum | |
| | | | lavamentivorans DS-1] | |
| | | | >gb\|ABS64709.1\|Glutathione S- | |
| | | | transferase domain [Parvibaculum | |
| | | | lavamentivorans DS-1] | |
| 335 | 336 | YP_001414838.1 | maleylacetoacetate isomerase | LigF |
| | | | [Parvibaculum lavamentivorans DS-1] | |
| | | | >gb\|ABS65181.1\|maleylacetoacetate | |
| | | | isomerase [Parvibaculum | |
| | | | lavamentivorans DS-1] | |
| 337 | 338 | YP_001684291.1 | glutathione S-transferase domain- | LigF |
| | | | containing protein [Caulobacter sp. K31] | |
| | | | >gb\|ABZ71793.1\|Glutathione S- | |
| | | | transferase domain [Caulobacter sp. | |
| | | | K31] | |
| 339 | 340 | YP_001770584.1 | glutathione S-transferase domain- | LigF |
| | | | containing protein [Methylobacterium sp. | |
| | | | 4-46] >gb\|ACA18150.1\|Glutathione S- | |
| | | | transferase domain [Methylobacterium | |
| | | | sp. 4-46] | |
| 341 | 342 | YP_002828116.1 | predicted glutathione S-transferase | LigF |
| | | | protein [Sinorhizobium fredii NGR234] | |
| | | | >gb\|ACP27363.1\|predicted glutathione | |
| | | | S-transferase protein [Sinorhizobium | |
| | | | fredii NGR234] | |
| 343 | 344 | YP_003593122.1 | glutathione S-transferase domain- | LigF |
| | | | containing protein [Caulobacter segnis | |
| | | | ATCC 21756] >gb\|ADG10504.1\| | |
| | | | Glutathione S-transferase domain | |
| | | | protein [Caulobacter segnis ATCC | |
| | | | 21756] | |
| 345 | 346 | YP_003930867.1 | glutathione S-transferase [Pantoea | LigF |
| | | | vagans C9-1] >gb\|ADO09418.1\| | |
| | | | Glutathione S-transferase [Pantoea | |
| | | | vagans C9-1] | |
| 347 | 348 | YP_004434596.1 | Glutathione S-transferase domain | LigF |
| | | | protein [Glaciecola agarilytica 4H-3- | |
| | | | 7 + YE-5] >gb\|AEE23328.1\|Glutathione S- | |
| | | | transferase domain protein [Glaciecola | |
| | | | sp. 4H-3-7 + YE-5] | |
| 349 | 350 | YP_004620883.1 | glutathione S-transferase [Ramlibacter | LigF |
| | | | tataouinensis TTB310] | |
| | | | >gb\|AEG94864.1\|glutathione S- | |
| | | | transferase-like protein [Ramlibacter | |
| | | | tataouinensis TTB310] | |
| 351 | 352 | YP_067874.1 | glutathione S-transferase family protein | LigF |
| | | | [Aeromonas punctata] | |
| | | | >emb\|CAG15111.1\|glutathione S- | |
| | | | transferase family protein [Aeromonas | |
| | | | caviae] | |
| 353 | 354 | YP_168502.1 | glutathione S-transferase, putative | LigF |
| | | | [Ruegeria pomeroyi DSS-3] | |
| | | | >gb\|AAV96533.1\|glutathione S- | |
| | | | transferase, putative [Ruegeria pomeroyi | |
| | | | DSS-3] | |
| 355 | 356 | YP_339058.1 | glutathione S-transferase | LigF |
| | | | [Pseudoalteromonas haloplanktis | |
| | | | TAC125] >emb\|CAI85615.1\|putative | |
| | | | glutathione S-transferase | |
| | | | [Pseudoalteromonas haloplanktis | |
| | | | TAC125] | |
| 357 | 358 | YP_612204.1 | glutathione S-transferase-like [Ruegeria | LigF |
| | | | sp. TM1040] >gb\|ABF62942.1\| | |
| | | | glutathione S-transferase-like protein | |
| | | | [Ruegeria sp. TM1040] | |
| 359 | 360 | ZP_00954574.1 | glutathione S-transferase family protein | LigF |
| | | | [Sulfitobacter sp. EE-36] | |
| | | | >ref\|ZP_00961889.1\|glutathione S- | |
| | | | transferase family protein [Sulfitobacter | |
| | | | sp. NAS-14.1] >gb\|EAP81303.1\| | |
| | | | glutathione S-transferase family protein | |
| | | | [Sulfitobacter sp. NAS-14.1] | |
| | | | >gb\|EAP85807.1\|glutathione S- | |
| | | | transferase family protein [Sulfitobacter | |
| | | | sp. EE-36] | |
| 361 | 362 | ZP_01165363.1 | maleylacetoacetate isomerase | LigF |
| | | | [Oceanospirillum sp. MED92] | |
| | | | >gb\|EAR62715.1\|maleylacetoacetate | |
| | | | isomerase [Oceanospirillum sp. MED92] | |
| 363 | 364 | ZP_01881157.1 | glutathione S-transferase, putative | LigF |
| | | | [Roseovarius sp. TM1035] | |
| | | | >gb\|EDM30676.1\|glutathione S- | |
| | | | transferase, putative [Roseovarius sp. | |
| | | | TM1035] | |
| 365 | 366 | ZP_03523367.1 | Glutathione S-transferase domain | LigF |
| | | | [Rhizobium etli GR56] | |
| 367 | 368 | ZP_04614975.1 | Glutathione S-transferase GST-6.0 | LigF |
| | | | [Yersinia ruckeri ATCC 29473] | |
| | | | >gb\|EEQ00521.1\|Glutathione S- | |
| | | | transferase GST-6.0 [Yersinia ruckeri | |
| | | | ATCC 29473] | |
| 369 | 370 | ZP_05125190.1 | glutathione S-transferase, N-terminal | LigF |
| | | | domain protein [Rhodobacteraceae | |
| | | | bacterium KLH11] >gb\|EEE36118.1\| | |
| | | | glutathione S-transferase, N-terminal | |
| | | | domain protein [Rhodobacteraceae | |
| | | | bacterium KLH11] | |
| 371 | 372 | ZP_05786193.1 | glutathione S-transferase [Silicibacter | LigF |
| | | | lacuscaerulensis ITI-1157] | |
| | | | >gb\|EEX09309.1\|glutathione S- | |
| | | | transferase [Silicibacter lacuscaerulensis | |
| | | | ITI-1157] | |
| 373 | 374 | ZP_08264339.1 | maleylacetoacetate isomerase | LigF |
| | | | [Asticcacaulis biprosthecum C19] | |
| | | | >gb\|EGF90974.1\|maleylacetoacetate | |
| | | | isomerase [Asticcacaulis biprosthecum | |
| | | | C19] | |
| 375 | 376 | ZP_08630058.1 | glutathione S-transferase | LigF |
| | | | [Bradyrhizobiaceae bacterium SG-6C] | |
| | | | >gb\|EGP07427.1\|glutathione S- | |
| | | | transferase [Bradyrhizobiaceae | |
| | | | bacterium SG-6C] | |
| 377 | 378 | AAG34806.1 | glutathione S-transferase GST 16 | LigF |
| | | | [Glycine max] | |
| 379 | 380 | AAQ02687.1 | tau class GST protein 3 [Oryza sativa | LigF |
| | | | Indica Group] >gb\|EAY79295.1\| | |
| | | | hypothetical protein OsI_34421 [Oryza | |
| | | | sativa Indica Group] >emb\|CAZ68078.1\| | |
| | | | glutathione S-transferase [Oryza sativa | |
| | | | Indica Group] | |
| 381 | 382 | ADV56298.1 | Glutathione S-transferase domain | LigF |
| | | | protein [Shewanella putrefaciens 200] | |
| 383 | 384 | BAB70616.1 | glutathione S-transferase [Medicago | LigF |
| | | | sativa] | |
| 385 | 386 | BAJ94610.1 | predicted protein [Hordeum vulgare | LigF |
| | | | subsp. vulgare] | |
| 387 | 388 | CAN68934.1 | hypothetical protein VITISV_002763 | LigF |
| | | | [Vitis vinifera] | |
| 389 | 390 | CBW26056.1 | putative glutathione S-transferase | LigF |
| | | | [Bacteriovorax marinus SJ] | |
| 391 | 392 | EFW18159.1 | glutathione S-transferase [Coccidioides | LigF |
| | | | posadasii str. Silveira] | |
| 393 | 394 | EGF84337.1 | hypothetical protein | LigF |
| | | | BATDEDRAFT_85058 | |
| | | | [Batrachochytrium dendrobatidis JAM81] | |
| 395 | 396 | NP_001065124.1 | Os10g0528400 [Oryza sativa Japonica | LigF |
| | | | Group] >gb\|AAG32472.1\|AF309379_1 | |
| | | | putative glutathione S-transferase | |
| | | | OsGSTU3 [Oryza sativa Japonica | |
| | | | Group] >gb\|AAM12325.1\|AC091680_26 | |
| | | | putative glutathione S-transferase [Oryza | |
| | | | sativa Japonica Group] | |
| | | | >gb\|AAM94544.1\|putative glutathione S- | |
| | | | transferase [Oryza sativa Japonica | |
| | | | Group] >gb\|AAP54745.1\|glutathione S- | |
| | | | transferase GSTU6, putative, expressed | |
| | | | [Oryza sativa Japonica Group] | |
| | | | >dbj\|BAF27038.1\|Os10g0528400 | |
| | | | [Oryza sativa Japonica Group] | |
| | | | >gb\|EAZ16756.1\|hypothetical protein | |
| | | | OsJ_32232 [Oryza sativa Japonica | |
| | | | Group] | |
| 397 | 398 | NP_191835.1 | Glutathione S-transferase-like protein | LigF |
| | | | [Arabidopsis thaliana] | |
| | | | >emb\|CAB83126.1\|Glutathione | |
| | | | transferase III-like protein [Arabidopsis | |
| | | | thaliana] >gb\|AEE80388.1\|Glutathione | |
| | | | S-transferase-like protein [Arabidopsis | |
| | | | thaliana] | |
| 399 | 400 | NP_717190.1 | glutathione S-transferase family protein | LigF |
| | | | [Shewanella oneidensis MR-1] | |
| | | | >gb\|AAN54634.1\|AE015603_8 | |
| | | | glutathione S-transferase family protein | |
| | | | [Shewanella oneidensis MR-1] | |
| 401 | 402 | NP_769143.1 | glutathione S-transferase | LigF |
| | | | [Bradyrhizobium japonicum USDA 110] | |
| | | | >dbj\|BAC47768.1\|glutathione S- | |
| | | | transferase [Bradyrhizobium japonicum | |
| | | | USDA 110] | |
| 403 | 404 | NP_900642.1 | glutathione transferase zeta 1 | LigF |
| | | | [Chromobacterium violaceum ATCC | |
| | | | 12472] >gb\|AAQ58646.1\|probable | |
| | | | glutathione transferase zeta 1 | |
| | | | [Chromobacterium violaceum ATCC | |
| | | | 12472] | |
| 405 | 406 | XP_001246353.1 | glutathione S-transferase [Coccidioides | LigF |
| | | | immitis RS] | |
| 407 | 408 | XP_002171087.1 | PREDICTED: similar to glutathione S- | LigF |
| | | | transferase [Hydra magnipapillata] | |
| 409 | 410 | XP_002263386.1 | PREDICTED: hypothetical protein [Vitis | LigF |
| | | | vinifera] >emb\|CBI32223.3\|unnamed | |
| | | | protein product [Vitis vinifera] | |
| 411 | 412 | XP_002263424.1 | PREDICTED: hypothetical protein [Vitis | LigF |
| | | | vinifera] >emb\|CBI32222.3\|unnamed | |
| | | | protein product [Vitis vinifera] | |
| 413 | 414 | XP_002272099.1 | PREDICTED: hypothetical protein | LigF |
| | | | isoform 2 [Vitis vinifera] | |
| 415 | 416 | XP_002527848.1 | glutathione s-transferase, putative | LigF |
| | | | [Ricinus communis] >gb\|EEF34551.1\| | |
| | | | glutathione s-transferase, putative | |
| | | | [Ricinus communis] | |
| 417 | 418 | XP_002786341.1 | Glutathione S-transferase A, putative | LigF |
| | | | [Perkinsus marinus ATCC 50983] | |
| | | | >gb\|EER18137.1\|Glutathione S- | |
| | | | transferase A, putative [Perkinsus | |
| | | | marinus ATCC 50983] | |
| 419 | 420 | XP_003066789.1 | Glutathione S-transferase, putative | LigF |
| | | | [Coccidioides posadasii C735 delta | |
| | | | SOWgp] >gb\|EER24644.1\|Glutathione | |
| | | | S-transferase, putative [Coccidioides | |
| | | | posadasii C735 delta SOWgp] | |
| 421 | 422 | XP_970577.1 | PREDICTED: similar to ganglioside- | LigF |
| | | | induced differentiation-associated- | |
| | | | protein 1 [Tribolium castaneum] | |
| | | | >gb\|EFA00477.1\|hypothetical protein | |
| | | | TcasGA2_TC003336 [Tribolium | |
| | | | castaneum] | |
| 423 | 424 | YP_001263559.1 | glutathione S-transferase domain- | LigF |
| | | | containing protein [Sphingomonas | |
| | | | wittichii RW1] >gb\|ABQ69421.1\| | |
| | | | Glutathione S-transferase, N-terminal | |
| | | | domain [Sphingomonas wittichii RW1] | |
| 425 | 426 | YP_001503032.1 | glutathione S-transferase domain- | LigF |
| | | | containing protein [Shewanella pealeana | |
| | | | ATCC 700345] >gb\|ABV88497.1\| | |
| | | | Glutathione S-transferase domain | |
| | | | [Shewanella pealeana ATCC 700345] | |
| 427 | 428 | YP_001516981.1 | glutathione S-transferase II | LigF |
| | | | [Acaryochloris marina MBIC11017] | |
| | | | >gb\|ABW27665.1\|glutathione S- | |
| | | | transferase II [Acaryochloris marina | |
| | | | MBIC11017] | |
| 429 | 430 | YP_001615392.1 | glutathione S-transferase, [Sorangium | LigF |
| | | | cellulosum ‘So ce 56’] | |
| | | | >emb\|CAN94912.1\|glutathione S- | |
| | | | transferase, putative [Sorangium | |
| | | | cellulosum ‘So ce 56’] | |
| 431 | 432 | YP_001685556.1 | glutathione S-transferase domain- | LigF |
| | | | containing protein [Caulobacter sp. K31] | |
| | | | >gb\|ABZ73058.1\|Glutathione S- | |
| | | | transferase domain [Caulobacter sp. | |
| | | | K31] | |
| 433 | 434 | YP_001748054.1 | glutathione S-transferase domain- | LigF |
| | | | containing protein [Pseudomonas putida | |
| | | | W619] >gb\|ACA71685.1\|Glutathione S- | |
| | | | transferase domain [Pseudomonas | |
| | | | putida W619] | |
| 435 | 436 | YP_001804371.1 | glutathione S-transferase [Cyanothece | LigF |
| | | | sp. ATCC 51142] >gb\|ACB52305.1\| | |
| | | | glutathione S-transferase [Cyanothece | |
| | | | sp. ATCC 51142] | |
| 437 | 438 | YP_002007283.1 | glutathione s-transferase protein; gsta | LigF |
| | | | protein [Cupriavidus taiwanensis LMG | |
| | | | 19424] >emb\|CAQ71222.1\|putative | |
| | | | glutathione S-transferase protein; gstA | |
| | | | protein [Cupriavidus taiwanensis LMG | |
| | | | 19424] | |
| 439 | 440 | YP_002130812.1 | glutathione S-transferase | LigF |
| | | | [Phenylobacterium zucineum HLK1] | |
| | | | >gb\|ACG78383.1\|glutathione S- | |
| | | | transferase [Phenylobacterium zucineum | |
| | | | HLK1] | |
| 441 | 442 | YP_002220633.1 | glutathione S-transferase domain | LigF |
| | | | [Acidithiobacillus ferrooxidans ATCC | |
| | | | 53993] >ref\|YP_002426974.1\| | |
| | | | glutathione S-transferase | |
| | | | [Acidithiobacillus ferrooxidans ATCC | |
| | | | 23270] >gb\|ACH84426.1\|Glutathione S- | |
| | | | transferase domain [Acidithiobacillus | |
| | | | ferrooxidans ATCC 53993] | |
| | | | >gb\|ACK78121.1\|glutathione S- | |
| | | | transferase [Acidithiobacillus | |
| | | | ferrooxidans ATCC 23270] | |
| 443 | 444 | YP_002482418.1 | glutathione S-transferase domain- | LigF |
| | | | containing protein [Cyanothece sp. PCC | |
| | | | 7425] >gb\|ACL44057.1\|Glutathione S- | |
| | | | transferase domain protein [Cyanothece | |
| | | | sp. PCC 7425] | |
| 445 | 446 | YP_002543747.1 | glutathione S-transferase protein | LigF |
| | | | [Agrobacterium radiobacter K84] | |
| | | | >gb\|ACM25821.1\|glutathione S- | |
| | | | transferase protein [Agrobacterium | |
| | | | radiobacter K84] | |
| 447 | 448 | YP_002974739.1 | glutathione S-transferase domain protein | LigF |
| | | | [Rhizobium leguminosarum bv. trifolii | |
| | | | WSM1325] >gb\|ACS55200.1\| | |
| | | | Glutathione S-transferase domain | |
| | | | protein [Rhizobium leguminosarum bv. | |
| | | | trifolii WSM1325] | |
| 449 | 450 | YP_004065207.1 | glutathione transferase | LigF |
| | | | [Pseudoalteromonas sp. SM9913] | |
| | | | >gb\|ADT70298.1\|glutathione | |
| | | | transferase [Pseudoalteromonas sp. | |
| | | | SM9913] | |
| 451 | 452 | YP_004357179.1 | glutathione S-transferase [Pseudomonas | LigF |
| | | | brassicacearum subsp. brassicacearum | |
| | | | NFM421] >gb\|AEA72175.1\|putative | |
| | | | glutathione S-transferase [Pseudomonas | |
| | | | brassicacearum subsp. brassicacearum | |
| | | | NFM421] | |
| 453 | 454 | YP_004680920.1 | glutathione S-transferase [Cupriavidus | LigF |
| | | | necator N-1] >gb\|AEI79688.1\| | |
| | | | glutathione S-transferase [Cupriavidus | |
| | | | necator N-1] | |
| 455 | 456 | YP_468810.1 | glutathione S-transferase [Rhizobium etli | LigF |
| | | | CFN 42] >gb\|ABC90083.1\|glutathione S- | |
| | | | transferase protein [Rhizobium etli CFN | |
| | | | 42] | |
| 457 | 458 | YP_554040.1 | glutathione S-transferase [Burkholderia | LigF |
| | | | xenovorans LB400] >gb\|ABE34690.1\| | |
| | | | Glutathione S-transferase [Burkholderia | |
| | | | xenovorans LB400] | |
| 459 | 460 | YP_612103.1 | glutathione S-transferase-like [Ruegeria | LigF |
| | | | sp. TM1040] >gb\|ABF62841.1\| | |
| | | | glutathione S-transferase-like protein | |
| | | | [Ruegeria sp. TM1040] | |
| 461 | 462 | YP_735310.1 | glutathione S-transferase domain- | LigF |
| | | | containing protein [Shewanella sp. MR-4] | |
| | | | >gb\|ABI40253.1\|Glutathione S- | |
| | | | transferase, N-terminal domain protein | |
| | | | [Shewanella sp. MR-4] | |
| 463 | 464 | YP_747567.1 | glutathione S-transferase domain- | LigF |
| | | | containing protein [Nitrosomonas | |
| | | | eutropha C91] >gb\|ABI59602.1\| | |
| | | | Glutathione S-transferase, C-terminal | |
| | | | domain [Nitrosomonas eutropha C91] | |
| 465 | 466 | YP_757227.1 | maleylacetoacetate isomerase | LigF |
| | | | [Maricaulis maris MCS10] | |
| | | | >gb\|ABI66289.1\|maleylacetoacetate | |
| | | | isomerase [Maricaulis maris MCS10] | |
| 467 | 468 | YP_868399.1 | glutathione S-transferase domain- | LigF |
| | | | containing protein [Shewanella sp. ANA- | |
| | | | 3] >gb\|ABK46993.1\|Glutathione S- | |
| | | | transferase, N-terminal domain protein | |
| | | | [Shewanella sp. ANA-3] | |
| 469 | 470 | YP_870498.1 | glutathione S-transferase domain- | LigF |
| | | | containing protein [Shewanella sp. ANA- | |
| | | | 3] >gb\|ABK49092.1\|Glutathione S- | |
| | | | transferase, N-terminal domain protein | |
| | | | [Shewanella sp. ANA-3] | |
| 471 | 472 | YP_957711.1 | glutathione S-transferase domain- | LigF |
| | | | containing protein [Marinobacter | |
| | | | aquaeolei VT8] >gb\|ABM17524.1\| | |
| | | | Glutathione S-transferase, N-terminal | |
| | | | domain [Marinobacter aquaeolei VT8] | |
| 473 | 474 | YP_957873.1 | glutathione S-transferase domain- | LigF |
| | | | containing protein [Marinobacter | |
| | | | aquaeolei VT8] >gb\|ABM17686.1\| | |
| | | | Glutathione S-transferase, N-terminal | |
| | | | domain [Marinobacter aquaeolei VT8] | |
| 475 | 476 | YP_960793.1 | glutathione S-transferase domain- | LigF |
| | | | containing protein [Marinobacter | |
| | | | aquaeolei VT8] >gb\|ABM20606.1\| | |
| | | | Glutathione S-transferase, N-terminal | |
| | | | domain [Marinobacter aquaeolei VT8] | |
| 477 | 478 | YP_963418.1 | glutathione S-transferase domain- | LigF |
| | | | containing protein [Shewanella sp. W3- | |
| | | | 18-1] >gb\|ABM24864.1\|Glutathione S- | |
| | | | transferase, N-terminal domain | |
| | | | [Shewanella sp. W3-18-1] | |
| 479 | 480 | ZP_01000028.1 | glutathione S-transferase family protein | LigF |
| | | | [Oceanicola batsensis HTCC2597] | |
| | | | >gb\|EAQ02499.1\|glutathione S- | |
| | | | transferase family protein [Oceanicola | |
| | | | batsensis HTCC2597] | |
| 481 | 482 | ZP_01459182.1 | glutathione S-transferase [Stigmatella | LigF |
| | | | aurantiaca DW4/3-1] | |
| | | | >ref\|YP_003956548.1\|glutathione s- | |
| | | | transferase [Stigmatella aurantiaca | |
| | | | DW4/3-1] >gb\|EAU70026.1\|glutathione | |
| | | | S-transferase [Stigmatella aurantiaca | |
| | | | DW4/3-1] >gb\|ADO74721.1\|Glutathione | |
| | | | S-transferase [Stigmatella aurantiaca | |
| | | | DW4/3-1] | |
| 483 | 484 | ZP_02886014.1 | Glutathione S-transferase domain | LigF |
| | | | [Burkholderia graminis C4D1M] | |
| | | | >gb\|EDT08402.1\|Glutathione S- | |
| | | | transferase domain [Burkholderia | |
| | | | graminis C4D1M] | |
| 485 | 486 | ZP_04713937.1 | Glutathione S-transferase [Alteromonas | LigF |
| | | | macleodii ATCC 27126] | |
| 487 | 488 | ZP_05075049.1 | Glutathione S-transferase, N-terminal | LigF |
| | | | domain protein [Rhodobacterales | |
| | | | bacterium HTCC2083] >gb\|EDZ42709.1\| | |
| | | | Glutathione S-transferase, N-terminal | |
| | | | domain protein [Rhodobacteraceae | |
| | | | bacterium HTCC2083] | |
| 489 | 490 | ZP_05101428.1 | glutathione S-transferase protein | LigF |
| | | | [Roseobacter sp. GAI101] | |
| | | | >gb\|EEB85730.1\|glutathione S- | |
| | | | transferase protein [Roseobacter sp. | |
| | | | GAI101] | |
| 491 | 492 | ZP_05124402.1 | glutathione S-transferase | LigF |
| | | | [Rhodobacteraceae bacterium KLH11] | |
| | | | >gb\|EEE39034.1\|glutathione S- | |
| | | | transferase [Rhodobacteraceae | |
| | | | bacterium KLH11] | |
| 493 | 494 | ZP_05926645.1 | glutathione S-transferase [Vibrio sp. | LigF |
| | | | RC341] >gb\|EEX64947.1\|glutathione S- | |
| | | | transferase [Vibrio sp. RC341] | |
| 495 | 496 | ZP_06308936.1 | Glutathione S-transferase-like protein | LigF |
| | | | [Cylindrospermopsis raciborskii CS-505] | |
| | | | >gb\|EFA69058.1\|Glutathione S- | |
| | | | transferase-like protein | |
| | | | [Cylindrospermopsis raciborskii CS-505] | |
| 497 | 498 | ZP_06838829.1 | Glutathione S-transferase domain | LigF |
| | | | protein [Burkholderia sp. Ch1-1] | |
| | | | >gb\|EFG73275.1\|Glutathione S- | |
| | | | transferase domain protein [Burkholderia | |
| | | | sp. Ch1-1] | |
| 499 | 500 | ZP_08104209.1 | glutathione S-transferase III [Vibrio | LigF |
| | | | sinaloensis DSM 21326] | |
| | | | >gb\|EGA68654.1\|glutathione S- | |
| | | | transferase III [Vibrio sinaloensis DSM | |
| | | | 21326] | |
| 501 | 502 | ZP_08275708.1 | Glutathione S-transferase | LigF |
| | | | [Oxalobacteraceae bacterium | |
| | | | IMCC9480] >gb\|EGF30821.1\| | |
| | | | Glutathione S-transferase | |
| | | | [Oxalobacteraceae bacterium | |
| | | | IMCC9480] | |
| 503 | 504 | ZP_08409706.1 | glutathione S-transferase | LigF |
| | | | [Pseudoalteromonas haloplanktis | |
| | | | ANT/505] >gb\|EGI73123.1\|glutathione S [symbol] | |
| | | | transferase [Pseudoalteromonas | |
| | | | haloplanktis ANT/505] | |
| 505 | 506 | ZP_08565123.1 | glutathione S-transferase [Shewanella | LigF |
| | | | sp. HN-41] >gb\|EGM70872.1\| | |
| | | | glutathione S-transferase [Shewanella | |
| | | | sp. HN-41] | |
| 507 | 508 | CAA12269.1 | ORF 3 [Sphingomonas sp. RW5] | LigF |
| 509 | 510 | CAC94002.1 | glutathione transferase [Triticum | LigF |
| | | | aestivum] | |
| 511 | 512 | NP_967294.1 | maleylacetoacetate isomerase/ | LigF |
| | | | glutathione S-transferase [Bdellovibrio | |
| | | | bacteriovorus HD100] | |
| | | | >emb\|CAE77948.1\|maleylacetoacetate | |
| | | | isomerase/glutathione S-transferase | |
| | | | [Bdellovibrio bacteriovorus HD100] | |
| 513 | 514 | P30347.1 | RecName: Full = Protein ligF | LigF |
| | | | >dbj\|BAA02031.1\|beta-etherase | |
| | | | [Sphingomonas paucimobilis] | |
| | | | >prf\|\|1914145A beta etherase | |
| 515 | 516 | XP_002964271.1 | hypothetical protein | LigF |
| | | | SELMODRAFT_142654 [Selaginella | |
| | | | moellendorffii] >gb\|EFJ34604.1\| | |
| | | | hypothetical protein | |
| | | | SELMODRAFT_142654 [Selaginella | |
| | | | moellendorffii] | |
| 517 | 518 | YP_001021314.1 | glutathione S-transferase-like protein | LigF |
| | | | [Methylibium petroleiphilum PM1] | |
| | | | >gb\|ABM95079.1\|glutathione S- | |
| | | | transferase-like protein [Methylibium | |
| | | | petroleiphilum PM1] | |
| 519 | 520 | YP_001862387.1 | glutathione S-transferase domain- | LigF |
| | | | containing protein [Burkholderia | |
| | | | phymatum STM815] >gb\|ACC75341.1\| | |
| | | | Glutathione S-transferase domain | |
| | | | [Burkholderia phymatum STM815] | |
| 521 | 522 | YP_002130750.1 | glutathione S-transferase | LigF |
| | | | [Phenylobacterium zucineum HLK1] | |
| | | | >gb\|ACG78321.1\|glutathione S- | |
| | | | transferase [Phenylobacterium zucineum | |
| | | | HLK1] | |
| 523 | 524 | YP_002825255.1 | glutathione S-transferase [Sinorhizobium | LigF |
| | | | fredii NGR234] >gb\|ACP24502.1\| | |
| | | | glutathione S-transferase [Sinorhizobium | |
| | | | fredii NGR234] | |
| 525 | 526 | YP_003908670.1 | glutathione S-transferase domain- | LigF |
| | | | containing protein [Burkholderia sp. | |
| | | | CCGE1003] >gb\|ADN59379.1\| | |
| | | | Glutathione S-transferase domain | |
| | | | protein [Burkholderia sp. CCGE1003] | |
| 527 | 528 | YP_004154430.1 | glutathione s-transferase domain- | LigF |
| | | | containing protein [Variovorax paradoxus | |
| | | | EPS] >gb\|ADU36319.1\|Glutathione S- | |
| | | | transferase domain [Variovorax | |
| | | | paradoxus EPS] | |
| 529 | 530 | YP_004229981.1 | glutathione S-transferase domain- | LigF |
| | | | containing protein [Burkholderia sp. | |
| | | | CCGE1001] >gb\|ADX56921.1\| | |
| | | | Glutathione S-transferase domain | |
| | | | protein [Burkholderia sp. CCGE1001] | |
| 531 | 532 | YP_004302768.1 | glutathione S-transferase, N-terminal | LigF |
| | | | domain protein [Polymorphum gilvum | |
| | | | SL003B-26A1] >gb\|ADZ69468.1\| | |
| | | | Glutathione S-transferase, N-terminal | |
| | | | domain protein [Polymorphum gilvum | |
| | | | SL003B-26A1] | |
| 533 | 534 | YP_004533892.1 | glutathione S-transferase-like protein | LigF |
| | | | [Novosphingobium sp. PP1Y] | |
| | | | >emb\|CCA92074.1\|glutathione S- | |
| | | | transferase-like [Novosphingobium sp. | |
| | | | PP1Y] | |
| 535 | 536 | YP_004533893.1 | glutathione S-transferase-like protein | LigF |
| | | | [Novosphingobium sp. PP1Y] | |
| | | | >emb\|CCA92075.1\|glutathione S- | |
| | | | transferase-like [Novosphingobium sp. | |
| | | | PP1Y] | |
| 537 | 538 | YP_004533905.1 | glutathione S-transferase-like protein | LigF |
| | | | [Novosphingobium sp. PP1Y] | |
| | | | >emb\|CCA92087.1\|glutathione S- | |
| | | | transferase-like [Novosphingobium sp. | |
| | | | PP1Y] | |
| 539 | 540 | YP_497364.1 | glutathione S-transferase-like protein | LigF |
| | | | [Novosphingobium aromaticivorans DSM | |
| | | | 12444] >gb\|ABD26530.1\|glutathione S- | |
| | | | transferase-like protein | |
| | | | [Novosphingobium aromaticivorans DSM | |
| | | | 12444] | |
| 541 | 542 | YP_498135.1 | glutathione S-transferase-like protein | LigF |
| | | | [Novosphingobium aromaticivorans DSM | |
| | | | 12444] >gb\|ABD27301.1\|glutathione S- | |
| | | | transferase-like protein | |
| | | | [Novosphingobium aromaticivorans DSM | |
| | | | 12444] | |
| 543 | 544 | YP_498142.1 | glutathione S-transferase-like protein | LigF |
| | | | [Novosphingobium aromaticivorans DSM | |
| | | | 12444] >gb\|ABD27308.1\|glutathione S- | |
| | | | transferase-like protein | |
| | | | [Novosphingobium aromaticivorans DSM | |
| | | | 12444] | |
| 545 | 546 | YP_498143.1 | glutathione S-transferase-like protein | LigF |
| | | | [Novosphingobium aromaticivorans DSM | |
| | | | 12444] >gb\|ABD27309.1\|glutathione S- | |
| | | | transferase-like protein | |
| | | | [Novosphingobium aromaticivorans DSM | |
| | | | 12444] | |
| 547 | 548 | ZP_00952372.1 | maleylacetoacetate isomerase | LigF |
| | | | [Oceanicaulis alexandrii HTCC2633] | |
| | | | >gb\|EAP91525.1\|maleylacetoacetate | |
| | | | isomerase [Oceanicaulis alexandrii | |
| | | | HTCC2633] | |
| 549 | 550 | ZP_00959702.1 | glutathione S-transferase, putative | LigF |
| | | | [Roseovarius nubinhibens ISM] | |
| | | | >gb\|EAP78164.1\|glutathione S- | |
| | | | transferase, putative [Roseovarius | |
| | | | nubinhibens ISM] | |
| 551 | 552 | ZP_01034543.1 | glutathione S-transferase, putative | LigF |
| | | | [Roseovarius sp. 217] >gb\|EAQ27224.1\| | |
| | | | glutathione S-transferase, putative | |
| | | | [Roseovarius sp. 217] | |
| 553 | 554 | ZP_01057917.1 | glutathione S-transferase, putative | LigF |
| | | | [Roseobacter sp. MED193] | |
| | | | >gb\|EAQ44057.1\|glutathione S- | |
| | | | transferase, putative [Roseobacter sp. | |
| | | | MED193] | |
| 555 | 556 | ZP_01223510.1 | glutathione S-transferase [marine | LigF |
| | | | gamma proteobacterium HTCC2207] | |
| | | | >gb\|EAS48069.1\|glutathione S- | |
| | | | transferase [marine gamma | |
| | | | proteobacterium HTCC2207] | |
| 557 | 558 | ZP_01753989.1 | glutathione S-transferase, putative | LigF |
| | | | [Roseobacter sp. SK209-2-6] | |
| | | | >gb\|EBA17470.1\|glutathione S- | |
| | | | transferase, putative [Roseobacter sp. | |
| | | | SK209-2-6] | |
| 559 | 560 | ZP_02146800.1 | glutathione S-transferase-like protein | LigF |
| | | | [Phaeobacter gallaeciensis BS107] | |
| | | | >gb\|EDQ11817.1\|glutathione S- | |
| | | | transferase-like protein [Phaeobacter | |
| | | | gallaeciensis BS107] | |
| 561 | 562 | ZP_02150992.1 | glutathione S-transferase, putative | LigF |
| | | | [Phaeobacter gallaeciensis 2.10] | |
| | | | >gb\|EDQ07480.1\|glutathione S- | |
| | | | transferase, putative [Phaeobacter | |
| | | | gallaeciensis 2.10] | |
| 563 | 564 | ZP_05073592.1 | glutathione S-transferase 2 | LigF |
| | | | [Rhodobacterales bacterium HTCC2083] | |
| | | | >gb\|EDZ41252.1\|glutathione S- | |
| | | | transferase 2 [Rhodobacteraceae | |
| | | | bacterium HTCC2083] | |
| 565 | 566 | ZP_05077451.1 | glutathione S-transferase | LigF |
| | | | [Rhodobacterales bacterium Y4I] | |
| | | | >gb\|EDZ45430.1\|glutathione S- | |
| | | | transferase [Rhodobacterales bacterium | |
| | | | Y4I] | |
| 567 | 568 | ZP_05087035.1 | Glutathione S-transferase, N-terminal | LigF |
| | | | domain protein [Pseudovibrio sp. JE062] | |
| | | | >gb\|EEA92555.1\|Glutathione S- | |
| | | | transferase, N-terminal domain protein | |
| | | | [Pseudovibrio sp. JE062] | |
| 569 | 570 | ZP_05089424.1 | glutathione S-transferase [Ruegeria sp. | LigF |
| | | | R11] >gb\|EEB71116.1\|glutathione S- | |
| | | | transferase [Ruegeria sp. R11] | |
| 571 | 572 | ZP_05126316.1 | protein LigF [gamma proteobacterium | LigF |
| | | | NOR5-3] >gb\|EED32863.1\|protein LigF | |
| | | | [gamma proteobacterium NOR5-3] | |
| 573 | 574 | ZP_05126823.1 | maleylacetoacetate isomerase [gamma | LigF |
| | | | proteobacterium NOR5-3] | |
| | | | >gb\|EED33370.1\|maleylacetoacetate | |
| | | | isomerase [gamma proteobacterium | |
| | | | NOR5-3] | |
| 575 | 576 | ZP_05741946.1 | glutathione S-transferase [Silicibacter sp. | LigF |
| | | | TrichCH4B] >gb\|EEW58747.1\| | |
| | | | glutathione S-transferase [Silicibacter sp. | |
| | | | TrichCH4B] | |

[symbol]

indicates data missing or illegible when filed

TABLE 18

| PROTEIN | GENE | GENBANK | | |
|---|---|---|---|---|
| SEQ ID | SEQ ID | ACCESSION | | |
| NO: | NO: | NO: | DESCRIPTION: | TYPE |
| 577 | 578 | BAA77216.1 | glutathione S-transferase homolog | LigG |
| | | | [Sphingomonas paucimobilis] | |
| 579 | 580 | YP_004533907. [symbol] | glutathione S-transferase family protein | LigG |
| | | | [Novosphingobium sp. PP1Y] | |
| | | | >emb\|CCA92089.1\|glutathione S- | |
| | | | transferase family protein | |
| 581 | 582 | YP_314808.1 | glutathione S-transferase family protein | LigG |
| | | | [Thiobacillus denitrificans ATCC 25259] | |
| | | | >gb\|AAZ97003.1\|glutathione S- | |
| | | | transferase family protein [Thiobacillus | |
| 583 | 584 | YP_167289.1 | glutathione S-transferase family protein | LigG |
| | | | [Ruegeria pomeroyi DSS-3] | |
| | | | >gb\|AAV95330.1\|glutathione S- | |
| | | | transferase family protein [Ruegeria | |
| 585 | 586 | ZP_01011943.1 | glutathione S-transferase family protein | LigG |
| | | | [Maritimibacter alkaliphilus HTCC2654] | |
| | | | >gb\|EAQ14262.1\|glutathione S- | |
| | | | transferase family protein | |
| 587 | 588 | YP_002540613. [symbol] | glutathione S-transferase protein | LigG |
| | | | [Agrobacterium radiobacter K84] | |
| | | | >gb\|ACM29018.1\|glutathione S- | |
| 589 | 590 | CAJ81793.1 | Novel glutathione S-transferase omega | LigG |
| | | | protein [Xenopus (Silurana) tropicalis] | |
| 591 | 592 | NP_001005086. [symbol] | glutathione S-transferase omega 2 | LigG |
| | | | [Xenopus (Silurana) tropicalis] | |
| | | | >gb\|AAH77010.1\|MGC89704 protein | |
| 593 | 594 | XP_624501.1 | PREDICTED: glutathione S-transferase | LigG |
| | | | omega-1 [Apis mellifera] | |
| 595 | 596 | XP_002029736. [symbol] | GM24932 [Drosophila sechellia] | LigG |
| | | | >gb\|EDW40722.1\|GM24932 [Drosophila | |
| 597 | 598 | NP_001002621. [symbol] | hypothetical protein LOC436894 [Danio | LigG |
| | | | rerio] >gb\|AAH75965.1\|Zgc: 92254 [Danio | |
| 599 | 600 | XP_002431486. [symbol] | predicted protein [Pediculus humanus | LigG |
| | | | corporis] >gb\|EEB18748.1\|predicted | |
| | | | protein [Pediculus humanus corporis] | |
| 601 | 602 | ADD18952.1 | glutathione S-transferase [Glossina | LigG |
| | | | morsitans morsitans] | |
| 603 | 604 | XP_002093444. [symbol] | GE21298 [Drosophila yakuba] | LigG |
| | | | >gb\|EDW93156.1\|GE21298 [Drosophila | |
| 605 | 606 | XP_002068563. [symbol] | GK20540 [Drosophila willistoni] | LigG |
| | | | >gb\|EDW79549.1\|GK20540 [Drosophila | |
| 607 | 608 | NP_001165912. [symbol] | glutathione S-transferase O1 [Nasonia | LigG |
| 609 | 610 | CAM34501.1 | putative glutathione S-transferase | LigG |
| | | | [Cotesia congregata] | |
| 611 | 612 | XP_421747.1 | PREDICTED: similar to glutathione-S- | LigG |
| | | | transferase homolog isoform 2 [Gallus | |
| 613 | 614 | XP_002135069. [symbol] | GA23449 [Drosophila pseudoobscura | LigG |
| | | | pseudoobscura] >gb\|EDY73696.1\| | |
| | | | GA23449 [Drosophila pseudoobscura | |
| 615 | 616 | NP_034492.1 | glutathione S-transferase omega-1 [Mus | LigG |
| | | | musculus] | |
| | | | >sp\|O09131.2\|GSTO1_MOUSE | |
| | | | RecName: Full = Glutathione S-transferase | |
| | | | omega-1; Short = GSTO-1; AltName: | |
| | | | Full = p28 >gb\|AAB70110.1\|glutathione-S- | |
| | | | transferase homolog [Mus musculus] | |
| | | | >dbj\|BAC25667.1\|unnamed protein | |
| | | | product [Mus musculus] | |
| | | | >gb\|AAH85165.1\|Glutathione S- | |
| | | | transferase omega 1 [Mus musculus] | |
| | | | >dbj\|BAE27469.1\|unnamed protein | |
| | | | product [Mus musculus] | |
| | | | [symbol] | |
| 617 | 618 | ZP_03524422.1 | glutathione S-transferase domain- | LigG |
| | | | containing protein [Rhizobium etli GR56] | |
| 619 | 620 | NP_729388.1 | CG6673, isoform A [Drosophila | LigG |
| | | | melanogaster] >gb\|AAF50404.2\|CG6673, | |
| | | | isoform A [Drosophila melanogaster] | |
| | | | >gb\|ACZ02426.1\|glutathione S- | |
| 621 | 622 | ZP_08179398.1 | glutathione S-transferase [Xanthomonas | LigG |
| | | | vesicatoria ATCC 35937] | |
| | | | >gb\|EGD08414.1\|glutathione S- | |
| 623 | 624 | XP_003218563. [symbol] | PREDICTED: glutathione S-transferase | LigG |
| | | | omega-1-like isoform 1 [Anolis | |
| 625 | 626 | ABC86304.1 | IP16242p [Drosophila melanogaster] | LigG |
| 627 | 628 | XP_002026470. [symbol] | GL15567 [Drosophila persimilis] | LigG |
| | | | >gb\|EDW33419.1\|GL15567 [Drosophila | |
| 629 | 630 | NP_001108461. [symbol] | glutathione S-transferase omega 4 | LigG |
| | | | [Bombyx mori] >gb\|ABY66601.1\| | |
| | | | glutathione S-transferase 13 [Bombyx | |
| 631 | 632 | NP_999215.1 | glutathione S-transferase omega-1 [Sus | LigG |
| | | | scrofa] >ref\|XP_001929519.1\| | |
| | | | PREDICTED: glutathione S-transferase | |
| | | | omega-1-like [Sus scrofa] | |
| | | | >sp\|Q9N1F5.2\|GSTO1_PIG RecName: | |
| | | | Full = Glutathione S-transferase omega-1; | |
| | | | Short = GSTO-1; AltName: | |
| | | | Full = Glutathione-dependent | |
| | | | dehydroascorbate reductase | |
| 633 | 634 | NP_001007373. [symbol] | hypothetical protein LOC492500 [Danio | LigG |
| | | | rerio] >gb\|AAH85467.1\|Zgc: 101897 | |
| | | | [Danio rerio] >gb\|AAI65433.1\|Zgc: 101897 | |
| 635 | 636 | YP_001566654. [symbol] | glutathione S-transferase domain- | LigG |
| | | | containing protein [Delftia acidovorans | |
| | | | SPH-1] >gb\|ABX38269.1\|Glutathione S- | |
| | | | transferase domain [Delftia acidovorans | |
| 637 | 638 | ADY80021.1 | omega class glutathione S-transferase | LigG |
| | | | [Oplegnathus fasciatus] | |
| 639 | 640 | YP_001329158. [symbol] | glutathione S-transferase domain- | LigG |
| | | | containing protein [Sinorhizobium | |
| | | | medicae WSM419] >gb\|ABR62323.1\| | |
| | | | Glutathione S-transferase domain | |
| 641 | 642 | NP_001084924. [symbol] | hypothetical protein LOC431979 | LigG |
| | | | [Xenopus laevis] >gb\|AAH70673.1\| | |
| | | | MGC82327 protein [Xenopus laevis] | |
| 643 | 644 | XP_003396907. [symbol] | PREDICTED: glutathione S-transferase | LigG |
| | | | omega-1-like [Bombus terrestris] | |
| 645 | 646 | XP_001368758. [symbol] | PREDICTED: glutathione S-transferase | LigG |
| | | | omega-1-like isoform 1 [Monodelphis | |
| 647 | 648 | XP_001983981. [symbol] | GH16193 [Drosophila grimshawi] | LigG |
| | | | >gb\|EDV96329.1\|GH16193 [Drosophila | |
| 649 | 650 | ADK66966.1 | glutathione s-transferase [Chironomus | LigG |
| 651 | 652 | XP_001232808. [symbol] | PREDICTED: similar to glutathione-S- | LigG |
| | | | transferase homolog isoform 1 [Gallus | |
| 653 | 654 | XP_002068565. [symbol] | GK20354 [Drosophila willistoni] | LigG |
| | | | >gb\|EDW79551.1\|GK20354 [Drosophila | |
| 655 | 656 | YP_001611239. [symbol] | hypothetical protein sce0602 [Sorangium | LigG |
| | | | cellulosum ‘So ce 56’] >emb\|CAN90759.1\| | |
| | | | gst2 [Sorangium cellulosum ‘So ce 56’] | |
| 657 | 658 | XP_001499427. [symbol] | PREDICTED: glutathione S-transferase | LigG |
| | | | omega-1-like isoform 1 [Equus caballus] | |
| 659 | 660 | NP_384409.1 | putative glutathione S-transferase protein | LigG |
| | | | [Sinorhizobium meliloti 1021] | |
| | | | >ref\|YP_004550950.1\|glutathione S- | |
| | | | transferase domain-containing protein | |
| | | | [Sinorhizobium meliloti AK83] | |
| | | | >emb\|CAC41740.1\|Putative glutathione | |
| | | | S-transferase [Sinorhizobium meliloti | |
| | | | 1021] >gb\|AEG06303.1\|Glutathione S- | |
| | | | transferase domain protein | |
| | | | [Sinorhizobium meliloti BL225C] | |
| | | | >gb\|AEG55336.1\|Glutathione S- | |
| | | | [symbol] | |
| 661 | 662 | CAG05035.1 | unnamed protein product [Tetraodon | LigG |
| 663 | 664 | ZP_01365353.1 | hypothetical protein PaerPA_01002475 | LigG |
| | | | [Pseudomonas aeruginosa PACS2] | |
| | | | >ref\|YP_002440902.1\| | |
| | | | maleylacetoacetate isomerase | |
| | | | [Pseudomonas aeruginosa LESB58] | |
| | | | >ref\|ZP_04928412.1\|maleylacetoacetate | |
| | | | isomerase [Pseudomonas aeruginosa | |
| | | | C3719] >gb\|EAZ52531.1\| | |
| | | | maleylacetoacetate isomerase | |
| | | | [Pseudomonas aeruginosa C3719] | |
| | | | >emb\|CAW28043.1\|maleylacetoacetate | |
| | | | isomerase [Pseudomonas aeruginosa | |
| | | | [symbol] | |
| 665 | 666 | YP_001348642. [symbol] | maleylacetoacetate isomerase | LigG |
| | | | [Pseudomonas aeruginosa PA7] | |
| | | | >gb\|ABR84080.1\|maleylacetoacetate | |
| | | | isomerase [Pseudomonas aeruginosa | |
| 667 | 668 | ZP_04933765.1 | maleylacetoacetate isomerase | LigG |
| | | | [Pseudomonas aeruginosa 2192] | |
| | | | >gb\|EAZ57884.1\|maleylacetoacetate | |
| | | | isomerase [Pseudomonas aeruginosa | |
| 669 | 670 | NP_250697.1 | maleylacetoacetate isomerase | LigG |
| | | | [Pseudomonas aeruginosa PAO1] | |
| | | | >sp\|P57109.1\|MAAI_PSEAE RecName: | |
| | | | Full = Maleylacetoacetate isomerase; | |
| | | | Short = MAAI | |
| | | | >gb\|AAG05395.1\|AE004627_3 | |
| 671 | 672 | EFN59352.1 | hypothetical protein | LigG |
| | | | CHLNCDRAFT_137800 [Chlorella | |
| 673 | 674 | YP_002945584. [symbol] | glutathione S-transferase domain- | LigG |
| | | | containing protein [Variovorax paradoxus | |
| | | | S110] >gb\|ACS20318.1\|Glutathione S- | |
| | | | transferase domain protein [Variovorax | |
| 675 | 676 | XP_002197460. [symbol] | PREDICTED: glutathione S-transferase | LigG |
| | | | omega 1 [Taeniopygia guttata] | |
| 677 | 678 | XP_001971643. [symbol] | GG15075 [Drosophila erecta] | LigG |
| | | | >gb\|EDV50669.1\|GG15075 [Drosophila | |
| 679 | 680 | NP_001155757. [symbol] | glutathione S-transferase omega-1-like | LigG |
| | | | [Acyrthosiphon pisum] >dbj\|BAH71013.1\| | |
| | | | ACYPI008340 [Acyrthosiphon pisum] | |
| 681 | 682 | XP_002026468. [symbol] | GL15565 [Drosophila persimilis] | LigG |
| | | | >gb\|EDW33417.1\|GL15565 [Drosophila | |
| 683 | 684 | XP_001353820. [symbol] | GA19760 [Drosophila pseudoobscura | LigG |
| | | | pseudoobscura] >gb\|EAL29555.1\| | |
| | | | GA19760 [Drosophila pseudoobscura | |
| 685 | 686 | YP_791232.1 | maleylacetoacetate isomerase | LigG |
| | | | [Pseudomonas aeruginosa UCBPP-PA14] | |
| | | | >gb\|ABJ11194.1\|maleylacetoacetate | |
| | | | isomerase [Pseudomonas aeruginosa | |
| 687 | 688 | ZP_06879058.1 | maleylacetoacetate isomerase | LigG |
| | | | [Pseudomonas aeruginosa PAb1] | |
| | | | >ref\|ZP_07797003.1\|maleylacetoacetate | |
| | | | isomerase [Pseudomonas aeruginosa | |
| | | | 39016] >gb\|EFQ42099.1\| | |
| | | | maleylacetoacetate isomerase | |
| | | | [Pseudomonas aeruginosa 39016] | |
| | | | >gb\|EGM14661.1\|maleylacetoacetate | |
| 689 | 690 | EFZ22366.1 | hypothetical protein SINV_14968 | LigG |
| 691 | 692 | ZP_03527925.1 | Glutathione S-transferase domain | LigG |
| | | | [Rhizobium etli CIAT 894] | |
| 693 | 694 | ABD77536.1 | hypothetical protein [Ictalurus punctatus] | LigG |
| 695 | 696 | XP_002756473. [symbol] | PREDICTED: glutathione S-transferase | LigG |
| | | | omega-1-like [Callithrix jacchus] | |
| 697 | 698 | XP_001636996. [symbol] | predicted protein [Nematostella vectensis] | LigG |
| | | | >gb\|EDO44933.1\|predicted protein | |
| | | | [Nematostella vectensis] | |
| 699 | 700 | YP_467831.1 | glutathione S-transferase [Rhizobium etli | LigG |
| | | | CFN 42] >gb\|ABC89104.1\|glutathione S- | |
| | | | transferase protein [Rhizobium etli CFN | |
| 701 | 702 | NP_103005.1 | glutathione-S-transferase [Mesorhizobium | LigG |
| | | | loti MAFF303099] >dbj\|BAB48791.1\| | |
| | | | glutathione-S-transferase [Mesorhizobium | |
| 703 | 704 | ADY47623.1 | Glutathione transferase omega-1 [Ascaris | LigG |
| 705 | 706 | BAG36430.1 | unnamed protein product [Homo sapiens] | LigG |
| 707 | 708 | XP_002718774. [symbol] | PREDICTED: glutathione-S-transferase | LigG |
| | | | omega 1 [Oryctolagus cuniculus] | |
| 709 | 710 | 3LFL_A | Chain A, Crystal Structure Of Human | LigG |
| | | | Glutathione Transferase Omega 1, Delta | |
| | | | 155 >pdb\|3LFL\|B Chain B, Crystal | |
| | | | Structure Of Human Glutathione | |
| | | | Transferase Omega 1, Delta 155 | |
| | | | >pdb\|3LFL\|C Chain C, Crystal Structure | |
| 711 | 712 | XP_002805857. [symbol] | PREDICTED: glutathione S-transferase | LigG |
| | | | omega-1-like [Macaca mulatta] | |
| | | | >gb\|ABO21635.1\|glutathione S- | |
| 713 | 714 | NP_001007603. [symbol] | glutathione S-transferase omega-1 | LigG |
| | | | [Rattus norvegicus] >gb\|AAH79363.1\| | |
| | | | Glutathione S-transferase omega 1 | |
| | | | [Rattus norvegicus] >gb\|EDL94393.1\| | |
| | | | glutathione S-transferase omega 1, | |
| 715 | 716 | XP_535007.1 | PREDICTED: similar to glutathione-S- | LigG |
| | | | transferase omega 1 isoform 1 [Canis | |
| 717 | 718 | NP_004823.1 | glutathione S-transferase omega-1 | LigG |
| | | | isoform 1 [Homo sapiens] | |
| | | | >sp\|P78417.2\|GSTO1_HUMAN | |
| | | | RecName: Full = Glutathione S-transferase | |
| | | | omega-1; Short = GSTO-1 >pdb\|1EEM\|A | |
| | | | Chain A, Glutathione Transferase From | |
| | | | Homo Sapiens | |
| | | | >gb\|AAF73376.1\|AF212303_1 glutathione | |
| | | | transferase omega [Homo sapiens] | |
| | | | >gb\|AAB70109.1\|glutathione-S- | |
| | | | transferase homolog [Homo sapiens] | |
| | | | >gb\|AAH00127.1\|Glutathione S- | |
| | | | transferase omega 1 [Homo sapiens] | |
| | | | >gb\|AAV68046.1\|glutathione S- | |
| | | | transferase omega 1-1 [Homo sapiens] | |
| | | | [symbol] | |
| 719 | 720 | XP_002758417. [symbol] | PREDICTED: glutathione S-transferase | LigG |
| | | | omega-1-like [Callithrix jacchus] | |
| 721 | 722 | XP_003218564. [symbol] | PREDICTED: glutathione S-transferase | LigG |
| | | | omega-1-like isoform 2 [Anolis | |
| 723 | 724 | EFN62827.1 | Glutathione transferase omega-1 | LigG |
| | | | [Camponotus floridanus] | |
| 725 | 726 | XP_508020.3 | PREDICTED: glutathione S-transferase | LigG |
| | | | omega-1 isoform 3 [Pan troglodytes] | |
| 727 | 728 | CAD97673.1 | hypothetical protein [Homo sapiens] | LigG |
| 729 | 730 | BAJ20927.1 | glutathione S-transferase omega 1 | LigG |
| | | | [synthetic construct] | |
| 731 | 732 | ACR43779.1 | glutathione S-transferase [Chironomus | LigG |
| 733 | 734 | Q9Z339.2 | RecName: Full = Glutathione S-transferase | LigG |
| | | | omega-1; Short = GSTO-1; AltName: | |
| | | | Full = Glutathione-dependent | |
| | | | dehydroascorbate reductase | |
| | | | >gb\|ACI32122.1\|glutathione S- | |
| 735 | 736 | XP_001956909. [symbol] | GF10159 [Drosophila ananassae] | LigG |
| | | | >gb\|EDV39715.1\|GF10159 [Drosophila | |
| 737 | 738 | XP_001742278. [symbol] | hypothetical protein [Monosiga brevicollis | LigG |
| | | | MX1] >gb\|EDQ92516.1\|predicted protein | |
| | | | [Monosiga brevicollis MX1] | |
| 739 | 740 | XP_002821176. [symbol] | PREDICTED: glutathione S-transferase | LigG |
| | | | omega-1-like [Pongo abelii] | |
| 741 | 742 | XP_003255483. [symbol] | PREDICTED: glutathione S-transferase | LigG |
| | | | omega-1-like isoform 1 [Nomascus | |
| 743 | 744 | YP_325490.1 | glutathione S-transferase-like protein | LigG |
| | | | [Anabaena variabilis ATCC 29413] | |
| | | | >gb\|ABA24595.1\|Glutathione S- | |
| | | | transferase-like protein [Anabaena | |
| 745 | 746 | XP_003208190. [symbol] | PREDICTED: glutathione S-transferase | LigG |
| | | | omega-1-like [Meleagris gallopavo] | |
| 747 | 748 | XP_002068562. [symbol] | GK20539 [Drosophila willistoni] | LigG |
| | | | >gb\|EDW79548.1\|GK20539 [Drosophila | |
| 749 | 750 | XP_001956911. [symbol] | GF10161 [Drosophila ananassae] | LigG |
| | | | >gb\|EDV39717.1\|GF10161 [Drosophila | |
| 751 | 752 | ABV24048.1 | gluthathione S-transferase omega | LigG |
| | | | [Takifugu obscurus] | |
| 753 | 754 | ZP_05086262.1 | putative glutathione S-transferase protein | LigG |
| | | | [Pseudovibrio sp. JE062] | |
| | | | >gb\|EEA93528.1\|putative glutathione S- | |
| | | | transferase protein [Pseudovibrio sp. | |
| 755 | 756 | AAI28951.1 | LOC100037104 protein [Xenopus laevis] | LigG |
| 757 | 758 | XP_001956910. [symbol] | GF10160 [Drosophila ananassae] | LigG |
| | | | >gb\|EDV39716.1\|GF10160 [Drosophila | |
| 759 | 760 | NP_001099052. [symbol] | glutathione S-transferase omega 2 | LigG |
| | | | [Xenopus laevis] >gb\|AAI53758.1\| | |
| | | | LOC100037104 protein [Xenopus laevis] | |
| 761 | 762 | ZP_03503214.1 | Glutathione S-transferase domain | LigG |
| | | | [Rhizobium etli Kim 5] | |
| 763 | 764 | XP_002046961. [symbol] | GJ12198 [Drosophila virilis] | LigG |
| | | | >gb\|EDW69303.1\|GJ12198 [Drosophila | |
| 765 | 766 | XP_001956912. [symbol] | GF24331 [Drosophila ananassae] | LigG |
| | | | >gb\|EDV39718.1\|GF24331 [Drosophila | |
| 767 | 768 | XP_001368790. [symbol] | PREDICTED: glutathione S-transferase | LigG |
| | | | omega-1-like isoform 1 [Monodelphis | |
| 769 | 770 | ZP_06308936.1 | Glutathione S-transferase-like protein | LigG |
| | | | [Cylindrospermopsis raciborskii CS-505] | |
| | | | >gb\|EFA69058.1\|Glutathione S- | |
| | | | transferase-like protein | |
| 771 | 772 | ABJ15788.1 | glutathione S-transferase omega 1 | LigG |
| | | | [Bombyx mandarina] >dbj\|BAF91356.1\| | |
| | | | omega-class glutathione S-transferase | |
| 773 | 774 | NP_001037406. [symbol] | glutathione S-transferase omega 2 | LigG |
| | | | [Bombyx mori] >gb\|ABC79689.1\| | |
| | | | glutathione S-transferase 6 [Bombyx mori] | |
| 775 | 776 | NP_001040131. [symbol] | glutathione S-transferase omega 1 | LigG |
| | | | [Bombyx mori] >gb\|ABD36128.1\| | |
| | | | glutathione S-transferase omega 1 | |

[symbol]

indicates data missing or illegible when filed

TABLE 19

| PROTEIN | GENE | | | |
|---|---|---|---|---|
| SEQ ID | SEQ ID | GENBANK | | |
| NO: | NO: | ACCESSION NO: | DESCRIPTION: | TYPE |
| 777 | 778 | Q01198.1 | RecName: Full = C alpha-dehydrogenase | LigD |
| | | | >dbj\|BAA02030.1\|C alpha-dehydrogenase | |
| | | | [Sphingomonas paucimobilis] | |
| | | | >dbj\|BAA01953.1\|C alpha-dehydrogenase | |
| | | | [Sphingomonas paucimobilis] | |
| | | | >gb\|AAC60455.1\|C alpha-dehydrogenase | |
| | | | [Sphingomonas paucimobilis] | |
| 779 | 780 | YP_495487.1 | short-chain dehydrogenase/reductase SDR | LigD |
| | | | [Novosphingobium aromaticivorans DSM | |
| | | | 12444] >gb\|ABD24653.1\|short-chain | |
| | | | dehydrogenase/reductase SDR | |
| | | | [Novosphingobium aromaticivorans DSM | |
| | | | 12444] | |
| 781 | 782 | YP_004533898.1 | short-chain dehydrogenase/reductase SDR | LigD |
| | | | [Novosphingobium sp. PP1Y] | |
| | | | >emb\|CCA92080.1\|short-chain | |
| | | | dehydrogenase/reductase SDR | |
| | | | [Novosphingobium sp. PP1Y] | |
| 783 | 784 | BAH56687.1 | Calpha-dehydrogenase [Sphingobium sp. | LigD |
| | | | SYK-6] | |
| 785 | 786 | YP_004533921.1 | short-chain dehydrogenase/reductase SDR | LigD |
| | | | [Novosphingobium sp. PP1Y] | |
| | | | >emb\|CCA92103.1\|short-chain | |
| | | | dehydrogenase/reductase SDR | |
| | | | [Novosphingobium sp. PP1Y] | |
| 787 | 788 | YP_496072.1 | short-chain dehydrogenase/reductase SDR | LigD |
| | | | [Novosphingobium aromaticivorans DSM | |
| | | | 12444] >gb\|ABD25238.1\|short-chain | |
| | | | dehydrogenase/reductase SDR | |
| | | | [Novosphingobium aromaticivorans DSM | |
| | | | 12444] | |
| 789 | 790 | 3IOY_A | Chain A, Structure Of Putative Short-Chain | LigD |
| | | | Dehydrogenase (Saro_0793) From | |
| | | | Novosphingobium Aromaticivorans | |
| | | | >pdb\|3IOY\|B Chain B, Structure Of Putative | |
| | | | Short-Chain Dehydrogenase (Saro_0793) | |
| | | | From Novosphingobium Aromaticivorans | |
| 791 | 792 | YP_496073.1 | short-chain dehydrogenase/reductase SDR | LigD |
| | | | [Novosphingobium aromaticivorans DSM | |
| | | | 12444] >gb\|ABD25239.1\|short-chain | |
| | | | dehydrogenase/reductase SDR | |
| | | | [Novosphingobium aromaticivorans DSM | |
| | | | 12444] | |
| 793 | 794 | BAH56683.1 | Calpha-dehydrogenase [Sphingobium sp. | LigD |
| | | | SYK-6] | |
| 795 | 796 | YP_004533920.1 | short-chain dehydrogenase/reductase SDR | LigD |
| | | | [Novosphingobium sp. PP1Y] | |
| | | | >emb\|CCA92102.1\|short-chain | |
| | | | dehydrogenase/reductase SDR | |
| | | | [Novosphingobium sp. PP1Y] | |
| 797 | 798 | YP_003592832.1 | short-chain dehydrogenase/reductase SDR | LigD |
| | | | [Caulobacter segnis ATCC 21756] | |
| | | | >gb\|ADG10214.1\|short-chain | |
| | | | dehydrogenase/reductase SDR [Caulobacter | |
| | | | segnis ATCC 21756] | |
| 799 | 800 | YP_495984.1 | short-chain dehydrogenase/reductase SDR | LigD |
| | | | [Novosphingobium aromaticivorans DSM | |
| | | | 12444] >gb\|ABD25150.1\|short-chain | |
| | | | dehydrogenase/reductase SDR | |
| | | | [Novosphingobium aromaticivorans DSM | |
| | | | 12444] | |
| 801 | 802 | YP_497149.1 | short-chain dehydrogenase/reductase SDR | LigD |
| | | | [Novosphingobium aromaticivorans DSM | |
| | | | 12444] >gb\|ABD26315.1\|short-chain | |
| | | | dehydrogenase/reductase SDR | |
| | | | [Novosphingobium aromaticivorans DSM | |
| | | | 12444] | |
| 803 | 804 | YP_003592830.1 | short-chain dehydrogenase/reductase SDR | LigD |
| | | | [Caulobacter segnis ATCC 21756] | |
| | | | >gb\|ADG10212.1\|short-chain | |
| | | | dehydrogenase/reductase SDR [Caulobacter | |
| | | | segnis ATCC 21756] | |
| 805 | 806 | YP_001260886.1 | short-chain dehydrogenase/reductase SDR | LigD |
| | | | [Sphingomonas wittichii RW1] | |
| | | | >gb\|ABQ66748.1\|short-chain | |
| | | | dehydrogenase/reductase SDR | |
| | | | [Sphingomonas wittichii RW1] | |
| 807 | 808 | YP_001413979.1 | short-chain dehydrogenase/reductase SDR | LigD |
| | | | [Parvibaculum lavamentivorans DS-1] | |
| | | | >gb\|ABS64322.1\|short-chain | |
| | | | dehydrogenase/reductase SDR | |
| | | | [Parvibaculum lavamentivorans DS-1] | |
| 809 | 810 | YP_001412300.1 | short-chain dehydrogenase/reductase SDR | LigD |
| | | | [Parvibaculum lavamentivorans DS-1] | |
| | | | >gb\|ABS62643.1\|short-chain | |
| | | | dehydrogenase/reductase SDR | |
| | | | [Parvibaculum lavamentivorans DS-1] | |
| 811 | 812 | YP_001412299.1 | short-chain dehydrogenase/reductase SDR | LigD |
| | | | [Parvibaculum lavamentivorans DS-1] | |
| | | | >gb\|ABS62642.1\|short-chain | |
| | | | dehydrogenase/reductase SDR | |
| | | | [Parvibaculum lavamentivorans DS-1] | |
| 813 | 814 | BAH56685.1 | Calpha-dehydrogenase [Sphingobium sp. | LigD |
| | | | SYK-6] | |
| 815 | 816 | NP_959644.1 | short chain dehydrogenase [Mycobacterium | LigD |
| | | | avium subsp. paratuberculosis K-10] | |
| | | | >ref\|YP_880159.1\|short chain | |
| | | | dehydrogenase [Mycobacterium avium 104] | |
| | | | >ref\|ZP_05215302.1\|short chain | |
| | | | dehydrogenase [Mycobacterium avium | |
| | | | subsp. avium ATCC 25291] | |
| | | | >gb\|AAS03027.1\|hypothetical protein | |
| | | | MAP_0710c [Mycobacterium avium subsp. | |
| | | | paratuberculosis K-10] >gb\|ABK67661.1\| | |
| | | | short chain dehydrogenase [Mycobacterium | |
| | | | avium 104] >gb\|EGO40035.1\|short-chain | |
| | | | alcohol dehydrogenase [Mycobacterium | |
| | | | avium subsp. paratuberculosis S397] | |
| 817 | 818 | ZP_08717023.1 | short chain dehydrogenase [Mycobacterium | LigD |
| | | | colombiense CECT 3035] >gb\|EGT85268.1\| | |
| | | | short chain dehydrogenase [Mycobacterium | |
| | | | colombiense CECT 3035] | |
| 819 | 820 | ZP_05127447.1 | oxidoreductase, short chain | LigD |
| | | | dehydrogenase/reductase family protein | |
| | | | [gamma proteobacterium NOR5-3] | |
| | | | >gb\|EED33994.1\|oxidoreductase, short | |
| | | | chain dehydrogenase/reductase family | |
| | | | protein [gamma proteobacterium NOR5-3] | |
| 821 | 822 | YP_004555419.1 | Estradiol 17-beta-dehydrogenase | LigD |
| | | | [Sphingobium chlorophenolicum L-1] | |
| | | | >gb\|AEG50913.1\|Estradiol 17-beta- | |
| | | | dehydrogenase [Sphingobium | |
| | | | chlorophenolicum L-1] | |
| 823 | 824 | YP_004230838.1 | short-chain dehydrogenase/reductase SDR | LigD |
| | | | [Burkholderia sp. CCGE1001] | |
| | | | >gb\|ADX57778.1\|short-chain | |
| | | | dehydrogenase/reductase SDR | |
| | | | [Burkholderia sp. CCGE1001] | |
| 825 | 826 | YP_004284589.1 | putative oxidoreductase [Acidiphilium | LigD |
| | | | multivorum AIU301] >dbj\|BAJ81707.1\| | |
| | | | putative oxidoreductase [Acidiphilium | |
| | | | multivorum AIU301] | |
| 827 | 828 | YP_001235233.1 | hypothetical protein Acry_2115 [Acidiphilium | LigD |
| | | | cryptum JF-5] >gb\|ABQ31314.1\|short-chain | |
| | | | dehydrogenase/reductase SDR [Acidiphilium | |
| | | | cryptum JF-5] | |
| 829 | 830 | ZP_01617820.1 | hypothetical protein GP2143_09415 [marine | LigD |
| | | | gamma proteobacterium HTCC2143] | |
| | | | >gb\|EAW30413.1\|hypothetical protein | |
| | | | GP2143_09415 [marine gamma | |
| | | | proteobacterium HTCC2143] | |
| 831 | 832 | ZP_08629833.1 | short-chain dehydrogenase/reductase | LigD |
| | | | [Bradyrhizobiaceae bacterium SG-6C] | |
| | | | >gb\|EGP07476.1\|short-chain | |
| | | | dehydrogenase/reductase | |
| | | | [Bradyrhizobiaceae bacterium SG-6C] | |
| 833 | 834 | YP_001853014.1 | short-chain type dehydrogenase/reductase | LigD |
| | | | [Mycobacterium marinum M] | |
| | | | >gb\|ACC43159.1\|short-chain type | |
| | | | dehydrogenase/reductase [Mycobacterium | |
| | | | marinum M] | |
| 835 | 836 | YP_004754457.1 | short-chain dehydrogenase/reductase SDR | LigD |
| | | | [Collimonas fungivorans Ter331] | |
| | | | >gb\|AEK63634.1\|short-chain | |
| | | | dehydrogenase/reductase SDR [Collimonas | |
| | | | fungivorans Ter331] | |
| 837 | 838 | ZP_05129129.1 | short-chain dehydrogenase/reductase SDR | LigD |
| | | | [gamma proteobacterium NOR5-3] | |
| | | | >gb\|EED30944.1\|short-chain | |
| | | | dehydrogenase/reductase SDR [gamma | |
| | | | proteobacterium NOR5-3] | |
| 839 | 840 | ZP_05223648.1 | short chain dehydrogenase [Mycobacterium | LigD |
| | | | intracellulare ATCC 13950] | |
| 841 | 842 | YP_004555383.1 | short-chain dehydrogenase/reductase SDR | LigD |
| | | | [Sphingobium chlorophenolicum L-1] | |
| | | | >gb\|AEG50877.1\|short-chain | |
| | | | dehydrogenase/reductase SDR | |
| | | | [Sphingobium chlorophenolicum L-1] | |
| 843 | 844 | YP_976997.1 | short chain dehydrogenase [Mycobacterium | LigD |
| | | | bovis BCG str. Pasteur 1173P2] | |
| | | | >ref\|YP_002643932.1\|short-chain | |
| | | | dehydrogenase [Mycobacterium bovis BCG | |
| | | | str. Tokyo 172] >ref\|ZP_06432004.1\|short- | |
| | | | chain type dehydrogenase/reductase | |
| | | | [Mycobacterium tuberculosis T46] | |
| | | | >ref\|ZP_06449040.1\|short-chain type | |
| | | | dehydrogenase/reductase [Mycobacterium | |
| | | | tuberculosis T17] >ref\|ZP_06453700.1\|short [symbol] | |
| | | | chain type dehydrogenase/reductase | |
| | | | [Mycobacterium tuberculosis K85] | |
| | | | >ref\|ZP_06508748.1\|short-chain type | |
| | | | dehydrogenase/reductase [Mycobacterium | |
| | | | tuberculosis T92] >ref\|ZP_06512283.1\|short | |
| | | | chain dehydrogenase [Mycobacterium | |
| | | | tuberculosis EAS054] >ref\|YP_004722558.1\| | |
| | | | short-chain type dehydrogenase/reductase | |
| | | | [Mycobacterium africanum GM041182] | |
| | | | >emb\|CAL70889.1\|Putative short-chain type | |
| | | | dehydrogenase/reductase [Mycobacterium | |
| | | | bovis BCG str. Pasteur 1173P2] | |
| | | | >dbj\|BAH25164.1\|short-chain | |
| | | | dehydrogenase [Mycobacterium bovis BCG | |
| | | | str. Tokyo 172] >gb\|EFD12419.1\|short- | |
| | | | chain type dehydrogenase/reductase | |
| | | | [Mycobacterium tuberculosis T46] | |
| | | | >gb\|EFD42482.1\|short-chain type | |
| | | | dehydrogenase/reductase [Mycobacterium | |
| | | | tuberculosis K85] >gb\|EFD46215.1\|short- | |
| 845 | 846 | ZP_01101659.1 | Short-chain dehydrogenase/reductase SDR | LigD |
| | | | [Congregibacter litoralis KT71] | |
| | | | >gb\|EAQ98875.1\|Short-chain | |
| | | | dehydrogenase/reductase SDR | |
| | | | [Congregibacter litoralis KT71] | |
| 847 | 848 | ZP_01615364.1 | short chain dehydrogenase [marine gamma | LigD |
| | | | proteobacterium HTCC2143] | |
| | | | >gb\|EAW32447.1\|short chain | |
| | | | dehydrogenase [marine gamma | |
| | | | proteobacterium HTCC2143] | |
| 849 | 850 | ZP_06436160.1 | short-chain type dehydrogenase/reductase | LigD |
| | | | [Mycobacterium tuberculosis CPHL_A] | |
| | | | >gb\|EFD16575.1\|short-chain type | |
| | | | dehydrogenase/reductase [Mycobacterium | |
| | | | tuberculosis CPHL_A] | |
| 851 | 852 | NP_854532.1 | short chain dehydrogenase [Mycobacterium | LigD |
| | | | bovis AF2122/97] >emb\|CAD93736.1\| | |
| | | | PUTATIVE SHORT-CHAIN TYPE | |
| | | | DEHYDROGENASE/REDUCTASE | |
| | | | [Mycobacterium bovis AF2122/97] | |
| 853 | 854 | YP_004744317.1 | putative short-chain type | LigD |
| | | | dehydrogenase/reductase [Mycobacterium | |
| | | | canettii CIPT 140010059] | |
| | | | >emb\|CCC43191.1\|putative short-chain | |
| | | | type dehydrogenase/reductase | |
| | | | [Mycobacterium canettii CIPT 140010059] | |
| 855 | 856 | YP_003947586.1 | short-chain dehydrogenase/reductase sdr | LigD |
| | | | [Paenibacillus polymyxa SC2] | |
| | | | >gb\|ADO57345.1\|Short-chain | |
| | | | dehydrogenase/reductase SDR | |
| | | | [Paenibacillus polymyxa SC2] | |
| 857 | 858 | YP_003951191.1 | short-chain dehydrogenase/reductase | LigD |
| | | | [Stigmatella aurantiaca DW4/3-1] | |
| | | | >gb\|ADO69364.1\|Short-chain | |
| | | | dehydrogenase/reductase SDR [Stigmatella | |
| | | | aurantiaca DW4/3-1] | |
| 859 | 860 | YP_583994.1 | hypothetical protein Rmet_1846 | LigD |
| | | | [Cupriavidus metallidurans CH34] | |
| | | | >gb\|ABF08725.1\|conserved hypothetical | |
| | | | protein [Cupriavidus metallidurans CH34] | |
| 861 | 862 | NP_215366.1 | short chain dehydrogenase [Mycobacterium | LigD |
| | | | tuberculosis H37Rv] >ref\|YP_001282151.1\| | |
| | | | short chain dehydrogenase [Mycobacterium | |
| | | | tuberculosis H37Ra] >ref\|YP_001286813.1\| | |
| | | | short chain dehydrogenase [Mycobacterium | |
| | | | tuberculosis F11] >ref\|ZP_02549252.1\|short | |
| | | | chain dehydrogenase [Mycobacterium | |
| | | | tuberculosis H37Ra] >ref\|YP_003033128.1\| | |
| | | | short-chain type dehydrogenase/reductase | |
| | | | [Mycobacterium tuberculosis KZN 1435] | |
| | | | >ref\|ZP_04924487.1\|hypothetical protein | |
| | | | TBCG_00842 [Mycobacterium tuberculosis | |
| | | | C] >ref\|ZP_04979832.1\|hypothetical short- | |
| | | | chain type dehydrogenase/reductase | |
| | | | [Mycobacterium tuberculosis str. Haarlem] | |
| | | | >ref\|ZP_05140274.1\|short chain | |
| | | | dehydrogenase [Mycobacterium tuberculosis | |
| | | | ‘98-R604 INH-RIF-EM’] | |
| | | | >ref\|ZP_06444578.1\|short-chain type | |
| | | | dehydrogenase/reductase [Mycobacterium | |
| | | | tuberculosis KZN 605] >ref\|ZP_06503955.1\| | |
| | | | short chain dehydrogenase [Mycobacterium | |
| | | | tuberculosis 02_1987] >ref\|ZP_06516315.1\| | |
| | | | short chain dehydrogenase [Mycobacterium | |
| | | | tuberculosis T85] >ref\|ZP_06520361.1\|short [symbol] | |
| | | | chain type dehydrogenase/reductase | |
| | | | [Mycobacterium tuberculosis GM 1503] | |
| | | | >ref\|ZP_06802023.1\|short chain | |
| | | | dehydrogenase [Mycobacterium tuberculosis | |
| | | | 210] >ref\|ZP_06951148.1\|short chain | |
| 863 | 864 | YP_904525.1 | short chain dehydrogenase [Mycobacterium | LigD |
| | | | ulcerans Agy99] >gb\|ABL03054.1\|short- | |
| | | | chain type dehydrogenase/reductase | |
| | | | [Mycobacterium ulcerans Agy99] | |
| 865 | 866 | ZP_06851131.1 | short-chain dehydrogenase/reductase family | LigD |
| | | | oxidoreductase [Mycobacterium | |
| | | | parascrofulaceum ATCC BAA-614] | |
| | | | >gb\|EFG75472.1\|short-chain | |
| | | | dehydrogenase/reductase family | |
| | | | oxidoreductase [Mycobacterium | |
| | | | parascrofulaceum ATCC BAA-614] | |
| 867 | 868 | YP_003871369.1 | 3-oxoacyl-[acyl-carrier-protein] reductase (3- | LigD |
| | | | ketoacyl-acyl carrier protein reductase) | |
| | | | [Paenibacillus polymyxa E681] | |
| | | | >gb\|ADM70831.1\|3-oxoacyl-[acyl-carrier- | |
| | | | protein] reductase (3-ketoacyl-acyl carrier | |
| | | | protein reductase) [Paenibacillus polymyxa | |
| | | | E681] | |
| 869 | 870 | ZP_05094873.1 | oxidoreductase, short chain | LigD |
| | | | dehydrogenase/reductase family [marine | |
| | | | gamma proteobacterium HTCC2148] | |
| | | | >gb\|EEB78920.1\|oxidoreductase, short | |
| | | | chain dehydrogenase/reductase family | |
| | | | [marine gamma proteobacterium | |
| | | | HTCC2148] | |
| 871 | 872 | ZP_01224235.1 | probable oxidoreductase dehydrogenase | LigD |
| | | | signal peptide protein [marine gamma | |
| | | | proteobacterium HTCC2207] | |
| | | | >gb\|EAS47242.1\|probable oxidoreductase | |
| | | | dehydrogenase signal peptide protein | |
| | | | [marine gamma proteobacterium | |
| | | | HTCC2207] | |
| 873 | 874 | YP_634033.1 | short chain dehydrogenase [Myxococcus | LigD |
| | | | xanthus DK 1622] >gb\|ABF86178.1\| | |
| | | | oxidoreductase, short chain | |
| | | | dehydrogenase/reductase family | |
| | | | [Myxococcus xanthus DK 1622] | |
| 875 | 876 | ABL97174.1 | short-chain dehydrogenase/reductase | LigD |
| | | | [uncultured marine bacterium EB0_49D07] | |
| 877 | 878 | NP_335301.1 | short chain dehydrogenase [Mycobacterium | LigD |
| | | | tuberculosis CDC1551] | |
| | | | >ref\|ZP_07413312.2\|short-chain type | |
| | | | dehydrogenase/reductase [Mycobacterium | |
| | | | tuberculosis SUMu001] | |
| | | | >ref\|ZP_07668817.1\|short-chain type | |
| | | | dehydrogenase/reductase [Mycobacterium | |
| | | | tuberculosis SUMu010] | |
| | | | >ref\|ZP_07669069.1\|short-chain type | |
| | | | dehydrogenase/reductase [Mycobacterium | |
| | | | tuberculosis SUMu011] >gb\|AAK45115.1\| | |
| | | | oxidoreductase, short-chain | |
| | | | dehydrogenase/reductase family | |
| | | | [Mycobacterium tuberculosis CDC1551] | |
| | | | >gb\|EFO75870.1\|short-chain type | |
| | | | dehydrogenase/reductase [Mycobacterium | |
| | | | tuberculosis SUMu001] >gb\|EFP48221.1\| | |
| | | | short-chain type dehydrogenase/reductase | |
| | | | [Mycobacterium tuberculosis SUMu010] | |
| | | | >gb\|EFP52129.1\|short-chain type | |
| | | | dehydrogenase/reductase [Mycobacterium | |
| | | | tuberculosis SUMu011] | |
| 879 | 880 | ZP_01627272.1 | short-chain dehydrogenase/reductase SDR | LigD |
| | | | [marine gamma proteobacterium | |
| | | | HTCC2080] >gb\|EAW39988.1\|short-chain | |
| | | | dehydrogenase/reductase SDR [marine | |
| | | | gamma proteobacterium HTCC2080] | |
| 881 | 882 | YP_002774647.1 | short chain dehydrogenase [Brevibacillus | LigD |
| | | | brevis NBRC 100599] >dbj\|BAH46143.1\| | |
| | | | probable short chain dehydrogenase | |
| | | | [Brevibacillus brevis NBRC 100599] | |
| 883 | 884 | YP_004533909.1 | short-chain dehydrogenase/reductase SDR | LigD |
| | | | [Novosphingobium sp. PP1Y] | |
| | | | >emb\|CCA92091.1\|short-chain | |
| | | | dehydrogenase/reductase SDR | |
| | | | [Novosphingobium sp. PP1Y] | |
| 885 | 886 | ZP_04751842.1 | short chain dehydrogenase [Mycobacterium | LigD |
| | | | kansasii ATCC 12478] | |
| 887 | 888 | ZP_08271356.1 | short-chain dehydrogenase/reductase SDR | LigD |
| | | | [gamma proteobacterium IMCC3088] | |
| | | | >gb\|EGG29327.1\|short-chain | |
| | | | dehydrogenase/reductase SDR [gamma | |
| | | | proteobacterium IMCC3088] | |
| 889 | 890 | YP_004666338.1 | short chain dehydrogenase [Myxococcus | LigD |
| | | | fulvus HW-1] >gb\|AEI65260.1\|short chain | |
| | | | dehydrogenase [Myxococcus fulvus HW-1] | |
| 891 | 892 | YP_001704647.1 | putative short chain | LigD |
| | | | dehydrogenase/reductase [Mycobacterium | |
| | | | abscessus ATCC 19977] | |
| | | | >emb\|CAM63993.1\|Putative short chain | |
| | | | dehydrogenase/reductase [Mycobacterium | |
| | | | abscessus] | |
| 893 | 894 | ZP_07283949.1 | cis-2,3-dihydrobiphenyl-2,3-diol | LigD |
| | | | dehydrogenase [Streptomyces sp. AA4] | |
| | | | >gb\|EFL12318.1\|cis-2,3-dihydrobiphenyl- | |
| | | | 2,3-diol dehydrogenase [Streptomyces sp. | |
| | | | AA4] | |
| 895 | 896 | YP_002005492.1 | hypothetical protein RALTA_A1476 | LigD |
| | | | [Cupriavidus taiwanensis LMG 19424] | |
| | | | >emb\|CAQ69425.1\|putative | |
| | | | OXIDOREDUCTASE DEHYDROGENASE | |
| | | | [Cupriavidus taiwanensis LMG 19424] | |
| 897 | 898 | YP_003543705.1 | SDR-family protein [Sphingobium japonicum | LigD |
| | | | UT26S] >dbj\|BAI95093.1\|SDR-family | |
| | | | protein [Sphingobium japonicum UT26S] | |
| 899 | 900 | YP_759628.1 | short chain dehydrogenase/reductase family | LigD |
| | | | oxidoreductase [Hyphomonas neptunium | |
| | | | ATCC 15444] >gb\|ABI75402.1\| | |
| | | | oxidoreductase, short chain | |
| | | | dehydrogenase/reductase family | |
| | | | [Hyphomonas neptunium ATCC 15444] | |
| 901 | 902 | ZP_03543905.1 | short-chain dehydrogenase/reductase SDR | LigD |
| | | | [Comamonas testosteroni KF-1] | |
| | | | >gb\|EED68191.1\|short-chain | |
| | | | dehydrogenase/reductase SDR | |
| | | | [Comamonas testosteroni KF-1] | |
| 903 | 904 | YP_003487191.1 | hypothetical protein SCAB_14801 | LigD |
| | | | [Streptomyces scabiei 87.22] | |
| | | | >emb\|CBG68626.1\|putative PROBABLE | |
| | | | SHORT-CHAIN TYPE | |
| | | | DEHYDROGENASE/REDUCTASE | |
| | | | [Streptomyces scabiei 87.22] | |
| 905 | 906 | AEG69105.1 | 3-oxoacyl-[acyl-carrier-protein] reductase | LigD |
| | | | [Ralstonia solanacearum Po82] | |
| 907 | 908 | YP_003841993.1 | short-chain dehydrogenase/reductase SDR | LigD |
| | | | [Clostridium cellulovorans 743B] | |
| | | | >ref\|ZP_07630916.1\|short-chain | |
| | | | dehydrogenase/reductase SDR [Clostridium | |
| | | | cellulovorans 743B] >gb\|ADL50229.1\|short- | |
| | | | chain dehydrogenase/reductase SDR | |
| | | | [Clostridium cellulovorans 743B] | |
| 909 | 910 | YP_001899010.1 | hypothetical protein Rpic_1437 [Ralstonia | LigD |
| | | | pickettii 12J] >gb\|ACD26578.1\|short-chain | |
| | | | dehydrogenase/reductase SDR [Ralstonia | |
| | | | pickettii 12J] | |
| 911 | 912 | ZP_07965490.1 | short chain dehydrogenase [Segniliparus | LigD |
| | | | rugosus ATCC BAA-974] >gb\|EFV13275.1\| | |
| | | | short chain dehydrogenase [Segniliparus | |
| | | | rugosus ATCC BAA-974] | |
| 913 | 914 | NP_250228.1 | short-chain dehydrogenase [Pseudomonas | LigD |
| | | | aeruginosa PAO1] >ref\|ZP_01364886.1\| | |
| | | | hypothetical protein PaerPA_01001998 | |
| | | | [Pseudomonas aeruginosa PACS2] | |
| | | | >ref\|YP_002441374.1\|putative short-chain | |
| | | | dehydrogenase [Pseudomonas aeruginosa | |
| | | | LESB58] >ref\|ZP_04933207.1\|hypothetical | |
| | | | protein PA2G_00514 [Pseudomonas | |
| | | | aeruginosa 2192] | |
| | | | >gb\|AAG04926.1\|AE004582_4 probable | |
| | | | short-chain dehydrogenase [Pseudomonas | |
| | | | aeruginosa PAO1] >gb\|EAZ57326.1\| | |
| | | | hypothetical protein PA2G_00514 | |
| | | | [Pseudomonas aeruginosa 2192] | |
| | | | >emb\|CAW28518.1\|probable short-chain | |
| | | | dehydrogenase [Pseudomonas aeruginosa | |
| | | | LESB58] >gb\|EGM16253.1\|putative short- | |
| | | | chain dehydrogenase [Pseudomonas | |
| | | | aeruginosa 138244] | |
| 915 | 916 | YP_001020978.1 | hypothetical protein Mpe_A1784 | LigD |
| | | | [Methylibium petroleiphilum PM1] | |
| | | | >gb\|ABM94743.1\|putative oxidoreductase | |
| | | | dehydrogenase signal peptide protein | |
| | | | [Methylibium petroleiphilum PM1] | |
| 917 | 918 | YP_003745682.1 | oxidoreductase dehydrogenase [Ralstonia | LigD |
| | | | solanacearum CFBP2957] | |
| | | | >emb\|CBJ43067.1\|putative oxidoreductase | |
| | | | dehydrogenase [Ralstonia solanacearum | |
| | | | CFBP2957] | |
| 919 | 920 | ADD82954.1 | BatM [Pseudomonas fluorescens] | LigD |
| 921 | 922 | ZP_06846575.1 | short-chain dehydrogenase/reductase family | LigD |
| | | | oxidoreductase [Mycobacterium | |
| | | | parascrofulaceum ATCC BAA-614] | |
| | | | >gb\|EFG80090.1\|short-chain | |
| | | | dehydrogenase/reductase family | |
| | | | oxidoreductase [Mycobacterium | |
| | | | parascrofulaceum ATCC BAA-614] | |
| 923 | 924 | ZP_05041687.1 | oxidoreductase, short chain | LigD |
| | | | dehydrogenase/reductase family | |
| | | | [Alcanivorax sp. DG881] >gb\|EDX89108.1\| | |
| | | | oxidoreductase, short chain | |
| | | | dehydrogenase/reductase family | |
| | | | [Alcanivorax sp. DG881] | |
| 925 | 926 | YP_726036.1 | hypothetical protein H16_A1536 [Ralstonia | LigD |
| | | | eutropha H16] >emb\|CAJ92668.1\| | |
| | | | conserved hypothetical protein [Ralstonia | |
| | | | eutropha H16] | |
| 927 | 928 | ZP_08275744.1 | Hypothetical Protein IMCC9480_775 | LigD |
| | | | [Oxalobacteraceae bacterium IMCC9480] | |
| | | | >gb\|EGF30787.1\|Hypothetical Protein | |
| | | | IMCC9480_775 [Oxalobacteraceae | |
| | | | bacterium IMCC9480] | |
| 929 | 930 | YP_791716.1 | putative short-chain dehydrogenase | LigD |
| | | | [Pseudomonas aeruginosa UCBPP-PA14] | |
| | | | >ref\|ZP_06879570.1\|putative short-chain | |
| | | | dehydrogenase [Pseudomonas aeruginosa | |
| | | | PAb1] >ref\|ZP_07792770.1\|putative short- | |
| | | | chain dehydrogenase [Pseudomonas | |
| | | | aeruginosa 39016] >gb\|ABJ10717.1\| | |
| | | | putative short-chain dehydrogenase | |
| | | | [Pseudomonas aeruginosa UCBPP-PA14] | |
| | | | >gb\|EFQ37866.1\|putative short-chain | |
| | | | dehydrogenase [Pseudomonas aeruginosa | |
| | | | 39016] >gb\|EGM15719.1\|putative short- | |
| | | | chain dehydrogenase [Pseudomonas | |
| | | | aeruginosa 152504] | |
| 931 | 932 | CAQ35702.1 | oxidoreductase dehydrogenase protein | LigD |
| | | | [Ralstonia solanacearum MolK2] | |
| 933 | 934 | ZP_07966320.1 | short chain dehydrogenase [Segniliparus | LigD |
| | | | rugosus ATCC BAA-974] >gb\|EFV12481.1\| | |
| | | | short chain dehydrogenase [Segniliparus | |
| | | | rugosus ATCC BAA-974] | |
| 935 | 936 | YP_002981437.1 | hypothetical protein Rpic12D_1478 | LigD |
| | | | [Ralstonia pickettii 12D] >gb\|ACS62765.1\| | |
| | | | short-chain dehydrogenase/reductase SDR | |
| | | | [Ralstonia pickettii 12D] | |
| 937 | 938 | YP_004685391.1 | C alpha-dehydrogenase LigD [Cupriavidus | LigD |
| | | | necator N-1] >gb\|AEI76910.1\|C alpha- | |
| | | | dehydrogenase LigD [Cupriavidus necator N- | |
| | | | 1] | |
| 939 | 940 | ZP_00945631.1 | Hypothetical Protein RRSL_01608 | LigD |
| | | | [Ralstonia solanacearum UW551] | |
| | | | >ref\|YP_002259522.1\|oxidoreductase | |
| | | | dehydrogenase protein [Ralstonia | |
| | | | solanacearum IPO1609] >gb\|EAP71895.1\| | |
| | | | Hypothetical Protein RRSL_01608 | |
| | | | [Ralstonia solanacearum UW551] | |
| | | | >emb\|CAQ61454.1\|oxidoreductase | |
| | | | dehydrogenase protein [Ralstonia | |
| | | | solanacearum IPO1609] | |
| 941 | 942 | NP_519890.1 | hypothetical protein RSc1769 [Ralstonia | LigD |
| | | | solanacearum GMI1000] | |
| | | | >emb\|CAD15471.1\|probable | |
| | | | oxidoreductase dehydrogenase signal | |
| | | | peptide protein [Ralstonia solanacearum | |
| | | | GMI1000] | |
| 943 | 944 | ZP_07676733.1 | oxidoreductase dehydrogenase signal | LigD |
| | | | peptide protein [Ralstonia sp. 5_7_47FAA] | |
| | | | >gb\|EFP64736.1\|oxidoreductase | |
| | | | dehydrogenase signal peptide protein | |
| | | | [Ralstonia sp. 5_7_47FAA] | |
| 945 | 946 | YP_003752456.1 | oxidoreductase dehydrogenase [Ralstonia | LigD |
| | | | solanacearum PSI07] >emb\|CBJ51176.1\| | |
| | | | putative oxidoreductase dehydrogenase | |
| | | | [Ralstonia solanacearum PSI07] | |
| 947 | 948 | YP_004533099.1 | hypothetical protein PP1Y_AT3242 | LigD |
| | | | [Novosphingobium sp. PP1Y] | |
| | | | >emb\|CCA91281.1\|conserved hypothetical | |
| | | | protein [Novosphingobium sp. PP1Y] | |
| 949 | 950 | YP_001564386.1 | hypothetical protein Daci_3363 [Delftia | LigD |
| | | | acidovorans SPH-1] >gb\|ABX36001.1\|short- | |
| | | | chain dehydrogenase/reductase SDR | |
| | | | [Delftia acidovorans SPH-1] | |
| 951 | 952 | YP_004488753.1 | short-chain dehydrogenase/reductase SDR | LigD |
| | | | [Delftia sp. Cs1-4] >gb\|AEF90398.1\|short- | |
| | | | chain dehydrogenase/reductase SDR | |
| | | | [Delftia sp. Cs1-4] | |
| 953 | 954 | YP_001188109.1 | short-chain dehydrogenase/reductase SDR | LigD |
| | | | [Pseudomonas mendocina ymp] | |
| | | | >gb\|ABP85377.1\|short-chain | |
| | | | dehydrogenase/reductase SDR | |
| | | | [Pseudomonas mendocina ymp] | |
| 955 | 956 | ADP99633.1 | short-chain dehydrogenase/reductase SDR | LigD |
| | | | [Marinobacter adhaerens HP15] | |
| 957 | 958 | YP_693638.1 | short-chain dehydrogenase/reductase family | LigD |
| | | | protein [Alcanivorax borkumensis SK2] | |
| | | | >emb\|CAL17366.1\|short-chain | |
| | | | dehydrogenase/reductase family | |
| | | | [Alcanivorax borkumensis SK2] | |
| 959 | 960 | YP_585740.1 | short-chain dehydrogenase/reductase SDR | LigD |
| | | | [Cupriavidus metallidurans CH34] | |
| | | | >gb\|ABF10471.1\|short-chain | |
| | | | dehydrogenase/reductase SDR [Cupriavidus | |
| | | | metallidurans CH34] | |
| 961 | 962 | YP_003277769.1 | short-chain dehydrogenase/reductase SDR | LigD |
| | | | [Comamonas testosteroni CNB-2] | |
| | | | >gb\|ACY32473.1\|short-chain | |
| | | | dehydrogenase/reductase SDR | |
| | | | [Comamonas testosteroni CNB-2] | |
| 963 | 964 | ZP_08406457.1 | hypothetical protein HGR_11311 | LigD |
| | | | [Hylemonella gracilis ATCC 19624] | |
| | | | >gb\|EGI76405.1\|hypothetical protein | |
| | | | HGR_11311 [Hylemonella gracilis ATCC | |
| | | | 19624] | |
| 965 | 966 | YP_003842521.1 | short-chain dehydrogenase/reductase SDR | LigD |
| | | | [Clostridium cellulovorans 743B] | |
| | | | >ref\|ZP_07632312.1\|short-chain | |
| | | | dehydrogenase/reductase SDR [Clostridium | |
| | | | cellulovorans 743B] >gb\|ADL50757.1\|short- | |
| | | | chain dehydrogenase/reductase SDR | |
| | | | [Clostridium cellulovorans 743B] | |
| 967 | 968 | ZP_07043693.1 | short-chain dehydrogenase/reductase SDR | LigD |
| | | | [Comamonas testosteroni S44] | |
| | | | >gb\|EFI62855.1\|short-chain | |
| | | | dehydrogenase/reductase SDR | |
| | | | [Comamonas testosteroni S44] | |
| 969 | 970 | YP_295629.1 | hypothetical protein Reut_A1415 [Ralstonia | LigD |
| | | | eutropha JMP134] >gb\|AAZ60785.1\|Short- | |
| | | | chain dehydrogenase/reductase SDR | |
| | | | [Ralstonia eutropha JMP134] | |
| 971 | 972 | CBJ37979.1 | putative oxidoreductase dehydrogenase | LigD |
| | | | [Ralstonia solanacearum CMR15] | |
| 973 | 974 | YP_004155471.1 | short-chain dehydrogenase/reductase sdr | LigD |
| | | | [Variovorax paradoxus EPS] | |
| | | | >gb\|ADU37360.1\|short-chain | |
| | | | dehydrogenase/reductase SDR [Variovorax | |
| | | | paradoxus EPS] | |
| 975 | 976 | YP_001353681.1 | hypothetical protein mma_1991 | LigD |
| | | | [Janthinobacterium sp. Marseille] | |
| | | | >gb\|ABR91341.1\|short-chain | |
| | | | dehydrogenase/reductase SDR | |
| | | | [Janthinobacterium sp. Marseille] | |

[symbol]

indicates data missing or illegible when filed

[0242] Those skilled in the art will recognize, or be able to ascertain using no more than routine experimentation, that there are many equivalents to the specific embodiments described herein that have been described and enabled to the extent that one of skill in the art can practice the invention well-beyond the scope of the specific embodiments taught herein. Such equivalents are intended to be encompassed by the following claims. In addition, there are numerous lists and Markush groups taught and claimed herein. One of skill will appreciate that each such list and group contains various species and can be modified by the removal, or addition, of one or more of species, since every list and group taught and claimed herein may not be applicable to every embodiment feasible in the practice of the invention. As such, components in such lists can be removed and are expected to be removed to reflect some embodiments taught herein. All publications, patents, patent applications, other references, accession numbers, ATCC numbers, etc., mentioned in this application are herein incorporated by reference into the specification to the same extent as if each was specifically indicated to be herein incorporated by reference in its entirety.

We claim:

1. An isolated recombinant polypeptide, comprising:
an amino acid sequence having at least 95% identity to SEQ ID NO:541, the amino acid sequence conserving residues 47-57, 63-76, 100, 101, 104, 107, 111, 112, 115, 116, 176, 194, 197, 198, 201, 202, and 206.

2. The isolated recombinant polypeptide of claim 1, wherein an amino acid substitution outside of the conserved residues is a conservative substitution.

3. The isolated recombinant polypeptide of claim 1, wherein, the amino acid sequence functions to cleave a beta-aryl ether.

4. A isolated recombinant polypeptide, comprising:
SEQ ID NO:541; or conservative substitutions thereof outside of conserved residues 47-57, 63-76, 100, 101, 104, 107, 111, 112, 115, 116, 176, 194, 197, 198, 201, 202, and 206.

5. A isolated recombinant glutathione S-transferase enzyme, comprising:
an amino acid sequence having at least 95% identity to SEQ ID NO:541, the amino acid sequence conserving residues conserved residues 47-57, 63-76, 100, 101, 104, 107, 111, 112, 115, 116, 176, 194, 197, 198, 201, 202, and 206;
wherein, the amino acid sequence functions to cleave a beta-aryl ether.

6. A isolated recombinant glutathione S-transferase enzyme, comprising:
an amino acid sequence having at least 95% identity to SEQ ID NO:541; wherein, the amino acid sequence functions to cleave a beta-aryl ether.

7. An isolated recombinant polypeptide, comprising:
a length ranging from about 256 to about 260 amino acids;
a first amino acid region consisting of residues 47-57 from SEQ ID NO:541, or conservative substitutions thereof outside of conserved residues 47, 48, 49, 50, 52, 54, 55, 56, 57;
a second amino acid region consisting of 63-76 from SEQ ID NO:541; and,
a third amino acid region consisting of residues 99-230 from SEQ ID NO:541, or conservative substitutions thereof outside of conserved residues 100, 101, 104, 107, 111, 112, 115, 116, 176, 194, 197, 198, 201, 202, and 206.

8. An isolated recombinant glutathione S-transferase enzyme, comprising:
a length ranging from about 279 to about 281 amino acids;
a first amino acid region having at least 95% identity to 47-57 from SEQ ID NO:541, or conservative substitutions thereof outside of conserved residues 47, 48, 49, 50, 52, 54, 55, 56, 57;
a second amino acid region consisting of 63-76 from SEQ ID NO:541; and,
a third amino acid region having at least 95% identity to residues 99-230 from SEQ ID NO:541, or conservative substitutions thereof outside of conserved residues 100, 101, 104, 107, 111, 112, 115, 116, 176, 194, 197, 198, 201, 202, and 206;
wherein, the recombinant glutathione S-transferase enzyme functions to cleave a beta-aryl ether.

9. The isolated recombinant polypeptide of claim 8, wherein an amino acid substitution outside of the conserved residues is a conservative substitution.

10. A method of cleaving a beta-aryl ether bond, comprising:
contacting an amino acid sequence having at least 95% identity to SEQ ID NO:541, the amino acid sequence conserving residues 47-57, 63-76, 100, 101, 104, 107, 111, 112, 115, 116, 176, 194, 197, 198, 201, 202, and 206 with a lignin-derived compound having (i) a beta-aryl ether bond and (ii) a molecular weight ranging from about 180 Daltons to about 3000 Daltons;
wherein, the contacting occurs in a solvent environment in which the lignin-derived compound is soluble.

11. The method of claim 10, wherein the lignin-derived compound has a molecular weight of about 180 Daltons to about 1000 Daltons.

12. The method of claim 10, wherein an amino acid substitution outside of the conserved residues is a conservative substitution.

13. The method of claim 10, wherein the solvent environment comprises water.

14. The method of claim 10, wherein the solvent environment comprises a polar organic solvent.

15. A method of cleaving a beta-aryl ether bond, comprising:
contacting a polypeptide comprising SEQ ID NO:541; or conservative substitutions thereof outside of conserved residues 47-57, 63-76, 100, 101, 104, 107, 111, 112, 115, 116, 176, 194, 197, 198, 201, 202, and 206 with a lignin-derived compound having (i) a beta-aryl ether bond and (ii) a molecular weight ranging from about 180 Daltons to about 3000 Daltons;
wherein, the contacting occurs in a solvent environment in which the lignin-derived compound is soluble.

16. The method of claim 15, wherein the lignin-derived compound has a molecular weight of about 180 Daltons to about 1000 Daltons.

17. The method of claim 15, wherein the solvent environment comprises water.

18. The method of claim 15, wherein the solvent environment comprises a polar organic solvent.

19. A system for bioprocessing lignin-derived compounds, comprising:
a polypeptide having at least 95% identity to SEQ ID NO:541, the amino acid sequence conserving residues 47-57, 63-76, 100, 101, 104, 107, 111, 112, 115, 116, 176, 194, 197, 198, 201, 202, and 206;
a lignin-derived compound having a beta-aryl ether bond and a molecular weight ranging from about 180 Daltons to about 3000 Daltons; and,
a solvent in which the lignin-derived compound is soluble;
wherein, the system functions to cleave the beta-aryl ether bond by contacting the polypeptide with the lignin-derived compound in the solvent.

20. The system of claim 19, wherein an amino acid substitution outside of the conserved residues is a conservative substitution.

The application's sequence listing, which the Patent Office published only in electronic form, follows.

SEQUENCE LISTING (1034 sequences)

SEQ ID NO: 1 - protein, 281 aa, Artificial Sequence
  Description of Artificial Sequence: Synthetic polypeptide
MARNNTITLYDLQLESGCTISPYVWRTKYALKHKGFDIDIVPGGFTGILERTGGRSERVPVIVDDGEWVLDSWVIAEYLDEKYPDRPMLFEGPTQKNLMKFLDNWLWSTAVGPWFRCYILDYHDLSLPQDRDYVRWSREQWFLGGQRLEDVQAGREDRLPLVPPTLEPFRRILAETKWLGGDQPNFADYSALAVFLWTASVARTPPLTEDDPLRDWLDRGFDLFDGLGRHPGMNPLFGLKLREGDPEPFVRQTGPAGAGGQALNKGPQTTKMPPRVAEKAD

SEQ ID NO: 2 - DNA, 843 bp, Artificial Sequence
  Description of Artificial Sequence: Synthetic polynucleotide
atggcgcgtaataacaccatcaccctgtacgacctgcagctggagtccggctgtaccatcagcccgtacgtgtggcgcacgaagtacgcgctgaagcataaggggttcgacatcgacatcgttcccggcggcttcaccggcattttggaacgcacgggtggccgcagcgagcgcgtcccggtcatcgtggacgacggcgaatgggtgctggactcgtgggtaatcgccgaatacctggacgagaagtaccccgaccgcccgatgctgttcgagggccccacccaaaagaacctcatgaagttcctggacaattggctgtggtccacggcggtcggcccttggttccgctgctacatcctggactaccacgatctcagtctcccgcaggaccgcgactatgtgcggtggagtcgcgagcagtggtttctgggcggtcagcgcctggaagacgtgcaggcgggccgtgaggaccgcctgccactcgtaccgccaacgctggagcccttccggcgcatcctcgccgagaccaaatggctgggtggcgaccagcccaacttcgccgactattccgcattggccgtgtttctctggaccgcatccgtcgcccgtacgccaccgctgaccgaggacgatccgctccgggactggctggaccgtggcttcgatctgttcgacggcctgggacggcaccccgggatgaacccgctgttcggcctgaaattgcgggagggcgatccggagccattcgtccgccaaaccggccctgccggggccggaggccaggcgctgaataagggcccgcaaaccaccaagatgcctccacgcgtagccgagaaggcggac

SEQ ID NO: 3 - protein, 281 aa, Artificial Sequence
  Description of Artificial Sequence: Synthetic polypeptide
MAKDNKITIYDLALASGATISPFVWATKYAIAHKGFELDIVPGGFSGIPERTGGVTERLPAIVDDGKWVLDSWLIAEYLDETYPERPTLIPHASVKALTQGMEAWLWGAAISPWMTCFIKQYRDRSLPQDHEYVTTSRERMFGRKIEDIIVGREDRIPKVPPTLQLLRNVLAENKWLGGDTPNYADFRLLAVFLFTASVADTPVLTDDDPLRDWIERGFDLYGGLGRHPGLSPIFGLQLREGDPEPFIKGGAVGGLATRNTGPKSTAAETARLKGEKAPAA

SEQ ID NO: 4 - DNA, 843 bp, Artificial Sequence
  Description of Artificial Sequence: Synthetic polynucleotide
atggccaaggacaacaagatcaccatctatgacctggcgctggcctcgggggccaccatctcgccgttcgtgtgggcgacgaagtacgccatcgcgcataagggcttcgaactggacatcgtcccgggcggcttctccggcatcccggagcgcaccggcggtgtcaccgaacggctgccggcgatcgtggacgacggtaagtgggtgctggactcctggctgatcgccgaatacctggacgagacctaccccgagcgcccgaccctgatcccgcacgcctccgtgaaggccctgacccaaggcatggaggcgtggctgtggggcgccgcgatcagcccgtggatgacctgcttcatcaagcagtaccgcgaccgcagcctgccccaggaccatgagtacgtgacgacctcccgcgagcggatgttcggccgcaagatcgaggacatcatcgtgggccgcgaggatcgcatccccaaggtgccgcccacgctgcagctcctgcgcaacgtgctggcggagaacaagtggctgggtggcgacacccccaattacgcggacttccgcctgctcgccgtcttcctcttcaccgcgagcgtggcggataccccggtcctcacggacgacgacccgctgcgcgactggatcgaacgcggcttcgatctctatggcggcctggggcgtcatccgggcctgtccccgatcttcggcctccaactccgcgaaggggacccggagccgttcatcaagggcggggccgtcggcgggctggcgacgcgcaacaccggcccgaagtccacggcggccgaaaccgcccgtctgaagggtgaaaaggccccggcggcg

SEQ ID NO: 5 - protein, 232 aa, Artificial Sequence
  Description of Artificial Sequence: Synthetic polypeptide
MTIDLTLYDLAGADPTLRFSPHCWKTHMALAHKGLSANTVPWRFTDKDVIEFSGQKLVPVLVHGDHVISDSWQIACYLEDTFPDRPSLFGGDTGRALSLFANTWADTTLVPTLARLLLPEIHALIDAKDQDYFRHTREKRFGPLEDLPALREEQLAALRASLLPLRQMLARQPYLAGQQPAYADYAVFGFFMWARCTSALELLAADDPVAAWRERLLDAHGGLARQAPVAAA

SEQ ID NO: 6 - DNA, 696 bp, Artificial Sequence
  Description of Artificial Sequence: Synthetic polynucleotide
atgacgatcgacctgacgctgtatgacctggccggtgcggacccgaccctgcgcttctccccgcattgttggaagacgcacatggcgctggcccataagggtctgtccgccaacaccgtcccctggcgcttcaccgacaaggacgtcatcgagttcagcggccaaaagctcgtgccggtcctcgtccacggggaccacgtgatcagcgactcctggcagatcgcctgctacctggaagataccttcccggaccgcccgagcctgttcgggggcgataccggccgcgccctgtcgctgttcgccaatacctgggccgacaccaccctggtgccgaccctcgcgcgcctgctcctgccggagatccacgcgctgatcgatgcgaaggaccaggactacttccgccacacccgcgaaaaacgcttcggcccgctggaggacctgccggcgctgcgcgaggagcaactggccgccctgcgcgcctccctgctgcccctgcgccagatgctggcccggcagccctatctggccgggcagcaacccgcctacgccgactatgccgtcttcgggttcttcatgtgggcccgttgtaccagcgccctggagctgctggccgcggatgatccggtcgcggcctggcgtgaacgcctcctggacgcccacggcggtctggcccgccaggcgccggtggccgccgcc

SEQ ID NO: 7 - protein, 267 aa, Artificial Sequence
  Description of Artificial Sequence: Synthetic polypeptide
MTIEFYELVAQDGRAFSPLCWPARLALAHKDIHPNVIACRFSEVDAKIAFTGQNVLPVLVDGADTVLDAWTIAEHLDTKYPNSGLGLLFPTSEAKETARRFNQHIQANNSCILHVIASDIARLQSDEDRAVFIQKRARHWNNLSVEEFTSQHRSNPASRPAINAFLQPFRDQLGSKKFMLGDAPTYADYLVASQFIWACTVSPYILIGEDDVLFQWRERVFDLFGDLVRNNPGACERDVPSHSVLIRDLYSGKIEAGARIAGTRVQA

SEQ ID NO: 8 - DNA, 801 bp, Artificial Sequence
  Description of Artificial Sequence: Synthetic polynucleotide
atgacgatcgagttctacgaactcgtggcgcaggatggccgcgcgttctcgccgctgtgttggccggcccgcctcgcgctggcgcacaaggacatccacccgaatgtcatcgcgtgtcgcttctcggaggtggatgcgaagatcgccttcacgggccagaacgtcctgccggtgctggtcgatggcgccgacaccgtcctggacgcctggaccatcgcggagcatctggacacgaagtatccgaactccggcctgggcctgctgttcccgacctccgaagccaaggagaccgcccggcgcttcaaccagcacatccaggccaacaacagctgcatcctccacgtgatcgcgtcggatatcgcgcgcctgcagagcgacgaggaccgggccgtcttcatccagaagcgggcgcgtcactggaacaacctgtcggtggaggagttcacgagccagcaccgcagcaatccggcgtcgcgccccgccatcaacgccttcctgcagcccttccgcgatcagctgggcagcaagaagttcatgctcggtgacgccccgacctacgccgactacctggtggcctcccaattcatctgggcctgtaccgtgtcgccgtacatcctgatcggcgaggacgacgtgctgttccaatggcgcgagcgcgtcttcgacctcttcggcgacctggtgcgcaacaaccccggggcctgcgagcgggacgtgccctcgcattccgtcctgatccgcgacctgtacagcggtaagatcgaagccggcgcgcgcatcgccggcacccgcgtgcaggcc

SEQ ID NO: 9 - protein, 204 aa, Artificial Sequence
  Description of Artificial Sequence: Synthetic polypeptide
MALAHKGLDFEEVPTTYARIREIGGGVSPTLPVLDDNGRLIPDSFAIALYLEEAYPERPSLFGGEGGKALSRLVEGYSQMIIHPAITRIALLDIHAILDEGDKAYFRESREARLGKSFEVIAADCEAEKAAFGAKLEPIRHMLKFQPFIGGQTPLFADYIVFGALQWLRVCTGFSMLAADDPVLAWFERCLDLHESRGRTVTAA

SEQ ID NO: 10 - DNA, 612 bp, Artificial Sequence
  Description of Artificial Sequence: Synthetic polynucleotide
atggccctcgcccacaagggcctggacttcgaggaggtgccgaccacctacgcccgcatccgcgaaatcggcggtggtgtgtcccccaccctcccggtcctcgacgacaacggccgtctgatcccggactcgttcgccatcgcgctgtatctggaggaggcgtaccccgaacgcccctcgctgttcggtggcgaagggggcaaagccctcagccgcctcgtggagggttacagccaaatgatcatccaccccgcgatcacccgcatcgccctcctggatatccacgcgatcctcgacgagggcgacaaagcctacttccgcgagagccgcgaggcccgcctggggaagtcgttcgaggtgatcgccgccgactgcgaggcggaaaaggcggcgttcggcgccaagctggagccgatccggcacatgctgaaattccagccgttcatcggcggccagaccccgctcttcgcggactacatcgtcttcggcgcgctgcaatggctccgcgtctgtaccggcttctcgatgctggcggcggatgacccggtcctggcctggttcgagcgctgcctggacctgcatgagtcgcgtggccgtaccgtgacggccgcg

SEQ ID NO: 11 - protein, 231 aa, Artificial Sequence
  Description of Artificial Sequence: Synthetic polypeptide
MTPDLTLYDLAGADPTLRFSPHCWKTRMALAHKGLSANTVPWRFTDKEAIEFSGQKLVPVLVHGDHVISDSWQIACYLEDTFPERPSLFGGDTGRALSLFANSWADTTLVPTLARLLLPEIHALIDAKDKDYFRHTREKRFGPLEDLPAMQEEQLAALRASLLPLRQMLARQPYLGGQQPAYADYAVFGFFMWARCTSALELLAADDPVAAWRERLLDAHGGLARQAPVPE

SEQ ID NO: 12 - DNA, 693 bp, Artificial Sequence
  Description of Artificial Sequence: Synthetic polynucleotide
atgaccccggatctgaccctgtacgacctggcgggtgccgacccgacgctgcggttctcgccccattgctggaagacccgcatggccctggcccataaaggcctgtccgccaacaccgtcccctggcggttcaccgacaaggaggccatcgagttcagcggccagaagctggtccccgtgctcgtccacggcgaccacgtcatctcggactcctggcagatcgcgtgttacctggaggacaccttcccggaacgtccctccctgttcggcggtgacaccggccgcgccctgagcctgttcgccaacagctgggcggacaccaccctggtgccgaccctcgcgcgcctgctgctcccggaaatccacgccctgatcgacgccaaggacaaggactacttccgccacacccgtgaaaagcgcttcggccccctggaagacctgccggccatgcaggaggagcagctggcggccctgcgcgccagcctgctgccgctgcgccaaatgctcgcgcggcagccgtacctgggtgggcagcagccggcctacgccgactatgcggtcttcgggttcttcatgtgggcgcgctgcacctccgccctggaactcctggcggcggatgaccccgtcgcggcctggcgcgagcgcctcctcgatgcccatggcgggctggcccggcaagccccggtcccggag

SEQ ID NO: 13 - protein, 205 aa, Artificial Sequence
  Description of Artificial Sequence: Synthetic polypeptide
MLSLAHKGLDFEERPLPFTVIPTVEDGFSRTVPILRDGDQLVSDSFEIALYLDEAYPERPSLFNGEGGKAMARFVESWSQTQLHPAITRIAVLDIHNMLDEPDRLYFRDSRTKALGRPLEDVVANRQAEIAAFPALLAPIRRMLSFQPFIGGTSPLFADYIVFGALQWARITTGADLFSENDPVRDWFEGCLDLHDARGRSVTAA

SEQ ID NO: 14 - DNA, 615 bp, Artificial Sequence
  Description of Artificial Sequence: Synthetic polynucleotide
atgctgagcctggcccataagggcctcgacttcgaggagcgcccgctgccgttcaccgtcatcccgaccgtcgaagacggcttcagccgcaccgtgccgatcctgcgggatggcgaccaactggtgtccgactcgttcgagatcgccctgtacctggacgaggcctacccggaacgcccgagcctgttcaacggcgaaggcggcaaagccatggcgcgcttcgtggaatcgtggtcccagacccagctgcatcccgccatcacccgtatcgcggtcctcgacatccacaacatgctggacgagccggaccgcctctacttccgcgattcgcgcaccaaggccctgggccgccccctcgaagacgtcgtggcgaatcgccaagcggagatcgccgccttcccggcgctgctcgcgccgatccgccgtatgctgtcgttccaaccgttcatcgggggcacctcgccgctgttcgcggactacatcgtcttcggcgcgctgcaatgggcccgcatcacgaccggcgccgacctgttctccgagaatgaccccgtccgggactggttcgagggctgtctggatctccacgacgcccgtgggcggagcgtcacggccgcg

SEQ ID NO: 15 - protein, 267 aa, Artificial Sequence
  Description of Artificial Sequence: Synthetic polypeptide
MAQQRIIFYDLVAEHGGPFFSPNTLKTRFSLLHKGVDFVEREVTFMELREMGPKMGLERAIIPCIELPDGSFIYDSWNIAEWLEKEYPDKPSLFLPDSPTPIKTDAPELTLAKNFALVFSEGFGSSDAQWSTFFEISAQGIYDLMPGTEETNPNKAYFRSDVKLGMKGAWEWLQSLDRQTLISHAQASLIPLDKILSKTPFLSGNNPGFADYVAFGRYYMMRCACPKECKAVWLRPETLPHVAEWVERLDKRWEKEMADATKRLPSM

SEQ ID NO: 16 - DNA, 801 bp, Artificial Sequence
  Description of Artificial Sequence: Synthetic polynucleotide
atggcccagcaacgcatcatcttctacgacctggtggccgagcatggcggccccttcttctccccgaacaccctgaagacccgcttctcgctgctccacaagggggtcgacttcgtggaacgcgaggtcaccttcatggaactgcgcgagatgggcccgaagatgggcctggaacgcgccatcatcccgtgcatcgagctgccggacggcagcttcatctacgactcctggaacatcgccgagtggctggagaaggagtatcccgacaagccctccctgttcctccccgactcgccgaccccgatcaagacggacgccccggaactgaccctggcgaaaaacttcgccctcgtgttcagcgaaggcttcggcagctcggacgcccagtggagcaccttcttcgagatcagcgcccagggcatctatgacctgatgccggggaccgaggagaccaacccgaacaaggcgtacttccgctcggacgtgaaactgggcatgaagggcgcctgggagtggctgcagagcctggaccggcaaacgctgatcagccatgcgcaggcgagcctgatccccctggacaagatcctctcgaagacgccgttcctgtccggcaacaacccgggtttcgccgactatgtggccttcggccgctactatatgatgcgctgcgcctgcccgaaagagtgcaaggccgtctggctgcggccggaaaccctcccgcatgtcgccgagtgggtcgaacgtctggacaagcggtgggaaaaagaaatggccgacgccaccaagcgcctgccctcgatg

SEQ ID NO: 17 - protein, 201 aa, Artificial Sequence
  Description of Artificial Sequence: Synthetic polypeptide
MALQHKGLPFTTVDVGFTEIDEASQGLFHTLPFIHDDHNRRIGGSFEIAEYLENAYPDTPSLFSSQQGKTLALFFEKWARTLHTDIARIAIFDIFNKLKDRDKAYFRASREKALGDSLENVQSNCQSASTAQLTDKLQLLEQHLKDLPFVGGEAPLYADYIVYGTLRWLFTVSENVKLTHLGPHIQTWYLQLDSKHSPNET

SEQ ID NO: 18 - DNA, 603 bp, Artificial Sequence
  Description of Artificial Sequence: Synthetic polynucleotide
atggccctgcaacataaagggctcccgttcaccaccgtcgatgtggggttcaccgaaatcgacgaggccagccaaggcctgttccacaccctgccgttcatccacgatgaccataaccggcgcatcggcgggtccttcgagatcgccgagtatctggagaacgcgtaccccgataccccgagcctgttctccagccagcaaggtaaaacgctggccctgttcttcgagaaatgggcgcgcaccctgcataccgacatcgcccgcatcgcgatcttcgacatcttcaacaagctgaaggaccgcgacaaggcgtacttccgggccagccgtgagaaggccctgggcgatagcctggaaaacgtgcagagcaactgtcagtccgcgtcgaccgcgcagctcaccgacaaactgcaactgctggagcagcacctcaaggatctgcccttcgtcggcggtgaagcgccgctgtacgccgactacatcgtgtacgggaccctgcggtggctgttcaccgtctccgaaaacgtcaagctgacccatctcggcccgcacatccagacctggtacctgcagctggacagcaagcacagcccgaacgagacc

SEQ ID NO: 19 - protein, 243 aa, Artificial Sequence
  Description of Artificial Sequence: Synthetic polypeptide
MTIILYDLVGSSEEIRFSPHCWKTRMSLAHKGLEYQTVPTTFVGVPEVEGGVSKTIPVIRDGEQVIADSFAIALYLDEAYPDRPALFEGKGGKSMGRFIERWSQLTLHPYIGVATLMEEVGLLEPESAAYFRKSREAKFGRALEEVARDRGVKLAAFRSALEPLRSMLTYQPFIGGSSPLFPDYIVFGAFQWARTTTTFQVLEESDPVNIWFERCLDLHGGLGRSFARAVWMPSAGEEETVCA

SEQ ID NO: 20 - DNA, 729 bp, Artificial Sequence
  Description of Artificial Sequence: Synthetic polynucleotide
atgaccatcatcctctatgacctggtcgggagctccgaggaaatccgcttctcgccgcactgctggaagacccgcatgtccctggcccataagggcctggagtatcagacggtccccaccaccttcgtcggcgtgccggaggtggagggcggcgtgtcgaagacgatcccggtcatccgcgacggcgagcaggtcatcgccgactccttcgccatcgccctgtacctcgatgaggcgtatccggatcgcccggcgctgttcgagggcaagggcggcaagagcatggggcgcttcatcgagcggtggagccagctgacgctgcatccctacatcggggtcgccacgctgatggaagaagtgggcctcctcgaacccgaatcggcggcgtatttccgcaagagccgcgaggcgaagttcggtcgtgcgctggaagaggtcgcgcgggaccgcggcgtgaaactcgccgccttccgctcggcgctggaacccctgcggagcatgctgacctatcaacccttcatcggcggcagctccccgctgttccccgactacatcgtcttcggcgcgttccagtgggcccgcaccacgacgaccttccaggtgctggaggaaagcgatcccgtgaacatctggttcgagcgctgcctggacctccatggcggcctgggccgcagcttcgcgcgtgcggtctggatgccgagcgcgggcgaggaagagaccgtgtgcgcc

SEQ ID NO: 21 - protein, 230 aa, Artificial Sequence
  Description of Artificial Sequence: Synthetic polypeptide
MTILLYELVGRDASRPFSPHCWKATMALAHKGLDISTAPTRFLEVPTIEGGASKTVPVIRDGDKVVIDSFAIALYLEDAYPDRPTLFGGEGGKTMARFIERWSQLTIHPYVTTAALIDLHGMQDDENAVYFRQSREQRFGRQLEDVVAARDAGLAAFRASLEPLRSTLGYQPFIGGAAPLFADYIVFGALQWARIATPYQLLEDSDVVAQWFARCLDLHGGLGRKVAAAA

SEQ ID NO: 22 - DNA, 690 bp, Artificial Sequence
  Description of Artificial Sequence: Synthetic polynucleotide
atgaccatcctgctgtacgagctggtcgggcgcgacgcgagccgcccgttctcgccccactgctggaaagcgacgatggccctcgcgcacaagggtctggatatcagcaccgcgcccacccgcttcctggaagtccccacgatcgaagggggcgcgtcgaaaacggtcccggtgatccgcgacggcgacaaagtcgtcatcgactccttcgcgatcgccctgtacctggaagacgcctatccggaccgcccgaccctcttcggcggtgaagggggcaagaccatggcccgcttcatcgagcgctggtcgcagctcaccatccatccgtacgtcaccaccgcggccctgatcgacctgcacggtatgcaggacgacgaaaatgccgtctacttccgccagtcccgtgaacagcggttcgggcggcagctggaggatgtggtcgccgcccgcgatgccggtctcgccgcgttccgtgcctccctcgaaccgctgcggtccaccctggggtaccagccgttcatcggtggcgccgccccgctcttcgcggactatatcgtcttcggcgcgctccagtgggcgcggatcgcgaccccgtaccagctcctggaagacagcgacgtggtcgcgcagtggttcgcgcggtgtctggatctgcatgggggcctggggcgcaaggtggccgccgcggcc

SEQ ID NO: 23 - protein, 231 aa, Artificial Sequence
  Description of Artificial Sequence: Synthetic polypeptide
MTNSRTLYSLCGSDISRPFSPHCWKTVLSLAHKGLDFEERPLPFTVIPTVEDGFSKTVPILRDGDQLVSDSFEIALYLDEAYPERPSLFDGDGGRSMARFVESWSQTVLHPVITRIAVLDIHNMLNEPDRVYFRDSRTKALGRPLEDVVANREAEIAAFPALLAPIRRMLSFQPFIGGASPLFADYIVFGALQWARITSGADLFADNDPVRDWFEGCLDLYDARGRSVTAA

SEQ ID NO: 24 - DNA, 693 bp, Artificial Sequence
  Description of Artificial Sequence: Synthetic polynucleotide
atgaccaacagccgcacgctctactccctctgcggctccgacatcagccggccgttctccccgcactgctggaaaacggtcctgtccctcgcgcacaagggcctggacttcgaagaacgccccctccccttcaccgtcatcccgaccgtggaagacggcttctcgaaaaccgtgccgatcctgcgcgacggcgatcagctcgtgtcggactccttcgagatcgcgctgtatctggacgaggcctaccccgaacgcccctccctgttcgacggcgacggcggtcgttcgatggcccgcttcgtcgagtcgtggtcccagaccgtgctccatccggtgatcacgcggatcgcggtgctggacatccacaacatgctgaatgagccggaccgcgtgtacttccgggacagccgtaccaaggccctcggccgccccctggaagacgtggtcgccaatcgggaggcggaaatcgcggcgttccccgcgctcctggccccgatccggcgtatgctgtccttccaacccttcatcggtggcgccagcccgctcttcgcggactacatcgtcttcggggccctccagtgggcccgtatcaccagcggggcggacctgttcgcggacaacgatccggtgcgcgactggttcgagggttgtctggacctgtacgacgcccggggtcgcagcgtgacggccgcc

SEQ ID NO: 25 - protein, 229 aa, Artificial Sequence
  Description of Artificial Sequence: Synthetic polypeptide
MTRKLYALSGTDTSRPFSPHVWKTKLSLAHKGLTFDIAPVGFTEIPRLEQGATKIVPLLRDGEKLVSDSFDIALYLEEAYPDRPPLLSGEGGKAMARFVEGWSQTTLHPAIGRIAIMDIHDSLDPIDRAYFRASREERFGRPLEAVAEAGRGDLETFSAKLEPIRHMLKFQPFLGGDRPLFADYIVFGALQWARIVSPHRLLAAGDVVTDWFERCLDLHDGLGRSVTAA

SEQ ID NO: 26 - DNA, 687 bp, Artificial Sequence
  Description of Artificial Sequence: Synthetic polynucleotide
atgacccgcaaactgtacgccctgtcgggcacggacacctcccgcccgttctccccgcacgtgtggaagaccaagctgtcgctcgcgcacaagggcctgaccttcgacatcgccccggtgggcttcaccgagatcccgcggctggagcagggcgccacgaagatcgtcccgctcctccgcgacggcgaaaagctggtgagcgactccttcgatatcgccctgtacctggaggaggcctacccggaccgcccgcccctgctgagcggcgaaggcggcaaggccatggcccgtttcgtggaaggctggtcgcaaaccaccctgcatccggccatcgggcgcatcgcgatcatggacatccatgacagcctcgaccccatcgaccgtgcgtatttccgtgccagccgcgaggagcggttcggtcgtccgctcgaagccgtcgccgaagcgggccgcggtgatctcgaaaccttcagcgcgaagctcgaaccgatccgccacatgctgaagttccagccgttcctgggcggcgaccggcccctcttcgccgactacatcgtcttcggcgcgctgcaatgggcgcgcatcgtgagcccccatcgcctcctggccgcgggtgacgtcgtgaccgactggttcgaacggtgtctggacctgcacgatggcctcggccgcagcgtgaccgcggcg

SEQ ID NO: 27 - protein, 252 aa, Artificial Sequence
  Description of Artificial Sequence: Synthetic polypeptide
MSPRRQSGLLRCVRDHGAPAMSLKLFELVGTDASRPFSPYCWRTRMALAHKGLAAESLPWRFTEKSAIAPHGSEKVPVLLHDDKPVVDSWTIANYLEDRFPDRPSLFGGEGGRAMARMINAFGDIAIVGGIFPLIIADIPKNLADVDAAYFRQSREARFGGKTLEEIMASRDAGVVAFRKSLEMMRQTLKKQPFIGGGAPNYADYIVFGGFQWARVTSPFKLLEADDPVYAWREKLLDAFDGMARTSPGHAV

SEQ ID NO: 28 - DNA, 756 bp, Artificial Sequence
  Description of Artificial Sequence: Synthetic polynucleotide
atgtcgccccggcgccaatccggcctgctgcggtgtgtccgcgaccatggtgccccggcgatgtccctgaagctcttcgaactcgtgggcaccgacgcgagccggccgttcagcccctattgctggcgtacgcggatggccctcgcccacaagggcctggccgcggaaagcctgccctggcgcttcaccgagaagtcggccatcgcgccgcatggcagcgaaaaggtgcccgtgctgctccacgacgataagccggtggtggactcgtggacgatcgccaattacctggaggaccgcttcccggaccgccccagcctcttcggcggggaaggcggtcgtgcgatggcgcggatgatcaacgcgttcggtgatatcgccatcgtcggtggtatcttcccgctgatcatcgccgacatccccaagaatctcgcggatgtggacgccgcctacttccggcagagccgcgaggcccgtttcggcggcaagacgctggaggaaatcatggcgtcgcgggacgccggggtcgtcgcgttccgcaagtcgctggagatgatgcgccagaccctgaaaaagcagccgttcatcggcggtggggccccgaactacgccgactacatcgtgttcggcggcttccagtgggcccgtgtcacgtcgccgttcaagctgctggaagcggacgacccggtctacgcgtggcgggaaaagctgctcgatgccttcgatggcatggcgcgcacctcgcccggccatgcggtc

SEQ ID NO: 29 - protein, 267 aa, Artificial Sequence
  Description of Artificial Sequence: Synthetic polypeptide
MDRRIKSGDDVRCGERPAPEMCGECPQPSRDLRTRDMTLKLFELVGADAGRPFSPFVWRTRMALAHKGLTAETIPWRFTDKAAIAPYGSEKVPVLLDGDKVVADSWAIANYLEDAYPDRPSLFGGDGGRAMARMLNWWGDLAIIGGIFPMIVADIAQRLDPEDAAYFRQSREARLKTTLEEAAASRDRAVQGFRKSLDPLRLTLKTQAFIGGAAPNYADYIVFGGFQWARVVSDFSLLQSDDPVYAWRERLLDAFGGLARATPGYPV

SEQ ID NO: 30 - DNA, 801 bp, Artificial Sequence
  Description of Artificial Sequence: Synthetic polynucleotide
atggatcgccggatcaagtccggcgacgacgtccggtgtggcgagcgcccggcccccgagatgtgcggtgagtgcccccaaccctcgcgggacctgcgcacgcgggatatgacgctgaagctgttcgaactcgtcggcgcggacgccggccgtcccttcagcccgttcgtgtggcgcacgcgcatggccctggcccataagggcctcacggccgagacgatcccgtggcgcttcaccgataaggccgccatcgccccgtacgggtcggaaaaggtcccggtgctcctggacggggacaaggtggtcgcggacagctgggccatcgccaactatctggaggacgcgtacccggaccgcccgagcctgttcggcggggacggcggtcgcgcgatggcgcgcatgctgaactggtggggcgacctcgccatcatcggcgggatcttcccgatgatcgtcgccgatatcgcgcagcgcctggaccccgaagacgccgcctatttccgccaaagccgtgaagcccggctcaagacgaccctggaagaggccgccgcctcccgcgaccgtgcggtgcaggggttccgcaagtcgctcgacccgctccgcctcaccctcaagacccaggcgttcatcggcggcgcggccccgaattacgcggactacatcgtcttcgggggcttccaatgggcccgcgtggtgagcgacttctccctgctgcagagcgacgatccggtgtacgcctggcgcgaacggctgctcgatgccttcggcggcctcgcccgcgccaccccggggtatccggtg

SEQ ID NO: 31 - protein, 281 aa, Artificial Sequence; identical to SEQ ID NO: 1
  Description of Artificial Sequence: Synthetic polypeptide

SEQ ID NO: 32 - DNA, 843 bp, Artificial Sequence
  Description of Artificial Sequence: Synthetic polynucleotide
atggcgcgcaacaacaccatcaccctctacgacctccagctggaatcgggctgcaccatctccccgtacgtctggcgcaccaagtatgccctcaaacacaaggggttcgacatcgatatcgtcccgggcggtttcacgggcatcctggagcgcaccgggggtcgctccgagcgcgtgccggtgatcgtggacgacggcgagtgggtgctggacagctgggtgatcgccgaatacctggacgagaagtacccggaccgcccgatgctgttcgaaggccccacgcaaaagaatctgatgaagttcctggacaactggctgtggagcaccgccgtcggcccgtggttccggtgttatatcctggactaccatgacctcagcctgccgcaggatcgggactacgtccgctggagccgcgaacaatggttcctgggcgggcagcgtctggaagatgtccaggccgggcgcgaggatcgcctgccgctcgtcccgccgaccctggaacccttccgccgcatcctggcggagaccaaatggctgggcggcgaccaacccaacttcgcggactactcggcgctggccgtgttcctctggaccgcctccgtggcccgcaccccgccgctgaccgaagatgacccgctccgtgactggctggatcggggcttcgacctgttcgacggcctgggccgtcatccgggcatgaacccgctgttcggcctcaagctgcgcgaaggcgacccggaacccttcgtgcgccagaccggccccgccggcgcgggtggccaggcgctgaacaagggcccgcaaacgacgaaaatgccgccgcgtgtcgcggagaaggccgat

SEQ ID NO: 33 - protein, 250 aa, Artificial Sequence
  Description of Artificial Sequence: Synthetic polypeptide
MAPIIFYDLTSKVGPWSPSTWRIRYALNFKGLPFRTEWVEYPDIEAKCKEIGAEPTGTRDGKPLYTVPVIQDPSTGRVVSNGPKIAKYLDETYPETPKLFPSGTEAKQTDVLTQLIQAAGPSMRPLVVPSTFDILDDVAKPYFRETRERMFGCKLEEIAAKGEAREASLEKLRGAFEVFVGRLDESGKDTPYLLGEKACYADFVVGANLQWLKALLGEESDLWQMTARVADGRLMKYLEDLAPYEGEWRA

SEQ ID NO: 34 - DNA, 750 bp, Artificial Sequence
  Description of Artificial Sequence: Synthetic polynucleotide
atggccccgatcatcttctatgacctcacctcgaaggtcggcccgtggtccccgtccacctggcgtatccgctacgccctgaacttcaaaggcctgccgttccgcaccgagtgggtcgagtatccggacatcgaggccaagtgcaaggaaatcggcgcggaacccaccggcacccgcgatggtaagcccctctataccgtcccggtgatccaggacccgagcaccgggcgcgtggtcagcaacggtccgaagatcgccaagtacctggatgagacctacccggagaccccgaagctgttccccagcgggaccgaagccaagcaaacggatgtcctgacgcagctgatccaagcggccggcccgagcatgcgtccgctggtcgtgccctcgaccttcgacatcctggacgacgtcgcgaagccgtacttccgggaaacccgggaacgcatgttcggctgtaagctggaagagatcgccgccaagggcgaagcgcgcgaggcgtccctcgaaaaactccggggcgccttcgaggtgttcgtgggtcgcctggatgagtccggtaaagatacgccgtacctgctcggcgagaaggcgtgctacgccgacttcgtcgtgggcgccaatctccagtggctcaaggcgctgctcggcgaggagtccgatctgtggcagatgaccgcccgcgtggcggatgggcggctgatgaagtatctggaggacctcgcgccgtatgaaggcgaatggcgcgcc

SEQ ID NO: 35 - protein, 240 aa, Artificial Sequence
  Description of Artificial Sequence: Synthetic polypeptide
MATKVGAYSPNTWRTRYALNYKGLPFTTVWLELCDVERELRAAGAPPAGTWPDGQPQYTVPAIFDSLTNRYVSDAHQIARYLDETYADRPMLFPHGTAGLQHAFVGQFISRVVFASIPIALKGCYAVMSERTQTYFRETREEIFGKKLEEIWAEAAVEKGWVDVKEGLDWLETIVKENGNDKLFLLGDTPTEADLAIAAMFQWINKASTPVWNQLKVLNGGRWARLVDALSRYESNETRA

SEQ ID NO: 36 - DNA, 720 bp, Artificial Sequence
  Description of Artificial Sequence: Synthetic polynucleotide
atggccaccaaggtcggcgcctattcgccgaacacgtggcgcacccgttacgccctgaactacaagggtctgccgttcaccaccgtctggctggaactctgcgatgtcgagcgtgagctgcgcgccgccggtgccccgccggccggtacctggccggatgggcaaccccagtacaccgtgcccgccatcttcgactcgctgaccaaccgctacgtcagcgacgcccatcagatcgcgcgctacctggacgagacctatgcggaccggccgatgctgttcccccacggcaccgcgggcctgcagcacgcgttcgtgggccaattcatctcgcgtgtcgtgttcgcgtcgatccccatcgccctcaagggctgttacgcggtcatgagcgagcgcacgcagacctatttccgggaaacccgcgaagagatcttcggcaagaagctggaggaaatctgggccgaggccgccgtcgagaagggctgggtggacgtgaaggaaggcctggactggctggagacgatcgtgaaagaaaacggcaacgacaagctgttcctgctgggcgacaccccgaccgaagccgacctggcgatcgccgccatgttccaatggatcaacaaggcgtccaccccggtctggaaccagctgaaggtcctgaatggcggccggtgggcccggctcgtggacgcgctgtcccgctatgagtcgaacgaaacccgtgcg

SEQ ID NO: 37 - protein, 259 aa, Artificial Sequence
  Description of Artificial Sequence: Synthetic polypeptide
MAQELVLYDIPTDGIGALSSNTWKTRYALNYKGIPFRTEWIDMPDIACTCKKIGAAPTAPPGGPLPEYTVPVIVDPSTGAVVSDSILIAAYLDKTYPDRPRILPEGTTALQRIFADDFGTRVTQPLIQWTSLTAMRVFTKRTVDYIRRTREPLLGMSFEAFFTPERAEQGRKAAIEGLNHFAEALEQQEKATRKTSTFVMGDTPSHADFVVAGQLMFLRKAFKDGWEEVRKLHGGRWSRLVAALVAWEGEDTKLVAAPP

SEQ ID NO: 38 - DNA, 777 bp, Artificial Sequence
  Description of Artificial Sequence: Synthetic polynucleotide
atggcgcaggagctggtgctgtacgacatcccgaccgacgggatcggggccctgagcagcaacacctggaagacccgttacgccctgaactataagggcatccccttccgcaccgagtggatcgacatgcccgacatcgcctgtacctgtaagaaaatcggcgcggccccgaccgcgccgccgggtggcccgctcccggaatacaccgtccccgtcatcgtcgacccgagcaccggggccgtggtcagcgattccatcctcatcgcggcctacctggacaagacctatcccgaccgtccccgcatcctcccggaagggaccaccgccctgcagcgcatcttcgccgacgatttcgggacccgcgtcacccaaccgctgatccagtggacctcgctgacggccatgcgtgtcttcaccaagcgcaccgtggactacatccggcggacccgcgagcccctgctgggcatgagcttcgaggccttcttcaccccggagcgcgccgagcaagggcggaaggccgcgatcgaaggcctgaatcacttcgccgaggccctggagcagcaagaaaaggccacccgcaaaaccagcaccttcgtgatgggcgacaccccgtcccatgccgatttcgtcgtggccggtcagctgatgttcctgcgcaaggcgttcaaggacggctgggaggaggtccgcaagctccatgggggccggtggtcccgtctggtcgcggcgctggtcgcgtgggaaggcgaggacaccaaactcgtggccgccccgccc

SEQ ID NO: 39 - protein, 247 aa, Artificial Sequence
  Description of Artificial Sequence: Synthetic polypeptide
MADQIEPEIVLYDLACTKNVCFSPVVWRIRLMLNYKRIPYRTIFLEFPDIEPTLKGLGLAPHDSGSGSKHKYTVPAIQHVSTNTYIMDSPAIAEFLESTYPDPPLLLTSELGREIETKARSAVGPAFGASVMPREIYILSPQAQEYFRSTREASLGRRLEDLLDPKKEGQAWAAVADKMRAVGELMLTHKVNGPFVLGAQPSYTDFFIAGSLQSARVVDEVVFQRCIKYPGYHNIYEACLPYMQKKD

SEQ ID NO: 40 - DNA, 741 bp, Artificial Sequence
  Description of Artificial Sequence: Synthetic polynucleotide
atggccgaccagatcgaacccgagatcgtgctctacgacctcgcctgcaccaagaatgtgtgtttctcgccggtcgtgtggcgcatccggctcatgctgaactataagcgcatcccgtaccggaccatcttcctggagttcccggacatcgagccgaccctcaaagggctggggctcgccccgcacgactcggggtccggctccaaacacaagtacaccgtccccgcgatccagcatgtgagcacgaacacgtatatcatggactcgccggccatcgcggagttcctggaatcgacctaccccgatccgccgctcctcctgaccagcgaactcggccgggaaatcgaaaccaaagcccggagcgccgtgggccccgccttcggcgccagcgtcatgccgcgcgaaatctacatcctgagcccgcaagcccaggagtacttccggtccacccgcgaagccagcctggggcgccgcctggaagacctgctggacccgaagaaggaaggccaggcgtgggccgccgtcgcggacaagatgcgcgccgtcggtgagctgatgctgacccacaaggtcaacggcccgttcgtgctgggcgcgcagccgtcctatacggacttcttcatcgccggctccctccaaagcgcccgcgtggtggacgaagtcgtgttccagcgttgcatcaagtacccgggctatcacaacatctacgaggcgtgtctcccgtatatgcagaagaaggac

SEQ ID NO: 41 - protein, 191 aa, Artificial Sequence
  Description of Artificial Sequence: Synthetic polypeptide
MTDIEQPDIILYDLACTKNVCFSPVVWKIRLMFNYKKIPYQTIFLEFPDIAPTLEELGLPSHSPGTGSHVNYTVPAIKHVPTGAYIMDSPAIAKFLETTYPNPPLPFTSELGKEIETNARSAIGPAFRISITPREHLILSPRSQEYFRAKSEKLLGCKLEELMNGEKEEKAWAGVKEKMNELRTVCVGRSS

SEQ ID NO: 42 - DNA, 573 bp, Artificial Sequence
  Description of Artificial Sequence: Synthetic polynucleotide
atgaccgacatcgagcaaccggacatcatcctgtatgatctggcctgtaccaagaacgtctgcttctccccggtcgtgtggaagatccgtctcatgttcaactacaagaagatcccgtaccaaaccatcttcctggagttcccggatatcgccccgacgctggaagaactgggcctgccgtcccatagcccgggcaccggttcgcatgtcaattacacggtcccggcgatcaaacatgtcccgaccggggcctatatcatggacagccccgccatcgcgaagttcctggaaaccacgtacccgaacccgccgctgccgttcaccagcgagctgggcaaggaaatcgaaaccaacgcgcggtcggccatcggtccggccttccgtatcagcatcacgccgcgcgagcatctcatcctgagcccgcgtagccaagagtacttccgtgcgaaatccgagaagctgctcggctgcaagctggaggagctgatgaacggcgagaaggaagagaaggcctgggccggcgtgaaggagaaaatgaacgaactgcggaccgtctgcgtcgggcgttcgagc

SEQ ID NO: 43 - protein, 229 aa, Artificial Sequence
  Description of Artificial Sequence: Synthetic polypeptide
MKLFELVGRDAGRPFSPFCWRTRMALAHKGLSAESIPWRFTEKGAIAAHGSEKVPVMLDGDRAVADSWAIANYLEDNHPDRPSLFGGAGGRAMARFMNAWGDIAIVGGIFPLIIADIPNNLAAEDAAYFRASREARFGKSLEDIMATRDQAVTGFRRSLEPLRQTLKTQPFIGGDAPNYADYIVFGGFQWARVVSPFRLLEGSDSVYAWRERLLDAFDGLARKSPGFAL

SEQ ID NO: 44 - DNA, 687 bp, Artificial Sequence
  Description of Artificial Sequence: Synthetic polynucleotide
atgaagctcttcgagctcgtgggtcgggacgccggtcgcccgttctcccccttctgctggcgtacgcggatggccctcgcccataagggcctgtccgccgagagcatcccctggcgtttcaccgaaaagggtgcgatcgccgcgcatggctcggaaaaggtgccggtgatgctggacggcgatcgtgcggtcgcggactcctgggccatcgccaactatctggaggacaaccacccggatcgtccctccctcttcgggggcgccggtggtcgcgcgatggcgcgcttcatgaatgcgtggggtgatatcgccatcgtcggcggcatcttcccgctcatcatcgccgacatccccaacaacctggccgccgaagatgcggcctacttccgtgcgtcccgcgaagcccgcttcggcaagagcctggaagacatcatggcgacccgggaccaagcggtgacggggttccgtcgcagcctggagccgctccggcagaccctcaagacccaaccgttcatcgggggcgatgcgccgaactacgcggactatatcgtcttcggcggcttccaatgggcccgggtcgtctcgccgttccgcctgctggaaggctccgacagcgtgtacgcgtggcgggaacggctgctcgatgccttcgacggcctggcgcgcaagtcgcccgggttcgccctg

SEQ ID NO: 45 - protein, 232 aa, Artificial Sequence
  Description of Artificial Sequence: Synthetic polypeptide
MREPLKLYDLAGADERVRFSPNCWRTRFALAHKGLPCETVVWRFMEKDAIAFSGQGKVPVLVDGTRHVHDSWTIALYLEDTYPDRPSLFGGAAGRGLARFVNQWTSEVLHPAIAKVVLPDLVDILHEGDRDYYRSTREAAFGTTVGALRAAREDNVNALRTTLRPLRSTLADQKFLAGDAPNYADHVAFSAFLWAHASSPVKILAADDTLHAWCGRMFDAYDGLARLLPAAA

SEQ ID NO: 46 - DNA, 696 bp, Artificial Sequence
  Description of Artificial Sequence: Synthetic polynucleotide
atgcgggagccgctcaaactgtacgacctggccggtgccgacgagcgggtccggttcagcccgaactgctggcgcacccgcttcgcgctggcccacaaaggcctcccgtgtgagaccgtggtgtggcggttcatggagaaggacgccatcgcgttctcgggccaggggaaggtgccggtcctcgtcgacggcacgcgtcacgtccacgacagctggaccatcgccctgtatctggaagacacctatccggaccggcccagcctgttcggtggtgcggcgggccgcggtctcgcccggttcgtcaaccaatggaccagcgaggtgctgcaccccgcgatcgcgaaggtggtgctgccggacctcgtggacatcctgcacgaaggcgatcgcgactattatcggagcacccgtgaagccgccttcggtaccaccgtcggggccctgcgtgccgcccgcgaggacaacgtcaacgccctccgcacgaccctccgtcccctgcgctcgacgctcgcggaccagaagttcctggccggcgatgccccgaactacgccgaccatgtggcgttcagcgccttcctctgggcccatgcgagctcgcccgtgaagatcctcgccgccgacgataccctgcatgcgtggtgtggccggatgttcgacgcgtacgacgggctggcccggctgctccccgccgccgcc

SEQ ID NO: 47 - protein, 229 aa, Artificial Sequence
  Description of Artificial Sequence: Synthetic polypeptide
MKLFELVGTDAGRPFSPFCWRSRLALAHKGLSVESIPWRFTEKSALAPYGSEKVPVMLDRDRAVADSWIIATYLEDTYPDRPSLFGGAGGRAMARFLNAWGDIAIVGGIFPLIIADIPNNLAAVDAAYFRQSREARFGKRLEEIMAPRDQAVVGFRKSLEPLRQTLKTQPFLGGDAPNYADYIVFGGFQWARVVSPFRLLEETDSVYAWRERLLDALDGLARNSPGYPV

SEQ ID NO: 48 - DNA, 687 bp, Artificial Sequence
  Description of Artificial Sequence: Synthetic polynucleotide
atgaaactcttcgagctggtgggcacggatgccggccgcccgttctccccgttctgctggcgcagccgcctggccctggcgcataagggcctcagcgtggagtcgatcccgtggcgcttcaccgagaaatccgcgctcgccccgtacggcagcgaaaaggtgcccgtcatgctggaccgggaccgggcggtggcggacagctggatcatcgccacgtatctggaggacacctacccggatcgcccctccctgttcggcggggcgggtggtcgggcgatggcccggttcctcaatgcctggggtgacatcgcgatcgtcggcggcatcttccccctcatcatcgccgatatcccgaacaacctggccgcggtcgacgccgcctacttccgccagtcccgcgaggcccgcttcggcaagcgcctggaggaaatcatggccccgcgcgatcaggccgtggtcggcttccggaagtcgctcgaaccgctgcgccagaccctgaagacgcaaccgttcctgggcggcgacgcgccgaattacgccgactacatcgtgttcggcgggttccaatgggcccgcgtggtctccccgttccgcctgctggaggagacggatagcgtctatgcctggcgggagcggctcctggatgccctggatggcctggcccggaacagcccgggctacccggtc

SEQ ID NO: 49 - protein, 237 aa, Artificial Sequence
  Description of Artificial Sequence: Synthetic polypeptide
MMAANITLYEIAVSGGASASPFVWRIKFSLARKGIPYRSKMLGLTDISRQFDGRFQTVPIIDFGDRQMNESIAIADWLDEAYPDLPAIFSGPAERAMIGFFDQWLLQLIVTGILPIYALDAHDGAAPHDRDYYRRSRESFFGQTLEEVVVKREERLPDVRRSFEPVRQTIVNQPFLGGTSPNFADMCLLGLFIFVGTIGTLPLLAADDPLVAYADRGFACFPSETASLRLKLGEPTR

SEQ ID NO: 50 - DNA, 711 bp, Artificial Sequence
  Description of Artificial Sequence: Synthetic polynucleotide
atgatggccgccaatatcaccctgtacgagatcgcggtcagcggcggtgccagcgcctccccgttcgtgtggcgcatcaagttcagcctggcccggaaaggcatcccgtaccgcagcaagatgctgggcctgaccgacatctcccgccagttcgatggccgcttccagaccgtcccgatcatcgacttcggggatcgccagatgaatgagagcatcgcgatcgcggactggctggacgaagcctatcccgatctcccggcgatcttctccggccccgccgagcgtgccatgatcggcttcttcgatcagtggctcctccagctgatcgtgaccggtatcctccccatctacgccctcgacgcccatgacggtgccgcgccccacgaccgcgactattaccgccggtcccgtgagtccttcttcggtcagaccctggaggaggtcgtcgtgaagcgcgaagaacgcctccccgatgtccgccgctcgttcgagccggtccgtcaaaccatcgtcaaccagccgttcctgggcggcacgtccccgaatttcgccgacatgtgtctgctcgggctcttcatcttcgtcggtaccatcggcacgctcccgctgctggcggccgatgaccccctggtcgcgtatgccgaccgtgggttcgcctgtttcccgagcgaaacggccagcctgcggctcaagctgggcgagccgacgcgc

SEQ ID NO: 51 - protein, 229 aa, Artificial Sequence
  Description of Artificial Sequence: Synthetic polypeptide
MTRKLYALCGTDKSRPFSPHVWKAKLSLAHKGLTFDVAPVGFTAIPSLEEGATKIVPLLRDGEKLVNDSFDIALYLEETYPDRPSLFAGEGGKAMARFVESWSQTALHTAIGRIAIMDIHDSLDPVDQAYFRASREQRFGKSLETVAGAGREDLEIFSAKLEPLRHMLKSQPFLGGNSPLFADYIVFGALQWARIVSPQRLLSEGDVVTDWFERCLELHGGLGRSVTAA

SEQ ID NO: 52 - DNA, 687 bp, Artificial Sequence
  Description of Artificial Sequence: Synthetic polynucleotide
atgacccgcaagctgtacgccctgtgtggcaccgataaaagccgtcccttctccccgcacgtgtggaaggccaagctgagcctcgcccataaggggctgaccttcgacgtggcgccggtgggcttcaccgccatcccgagcctggaagaaggtgcgaccaagatcgtcccgctcctgcgggacggcgagaagctggtcaacgacagcttcgatatcgccctgtacctggaggagacctacccggaccgcccgagcctcttcgcgggcgaaggcgggaaggcgatggcccggttcgtggagtcctggtcccagaccgcgctgcacaccgccatcggccgcatcgcgatcatggacatccacgactccctggacccggtggaccaggcctatttccgggccagccgcgaacagcgcttcggcaagtcgctggagaccgtcgcgggcgcgggtcgcgaagacctggaaatcttcagcgccaagctggagccgctccgccacatgctcaagagccagccgttcctcggcggtaacagcccgctgttcgccgactacatcgtgttcggcgcgctccagtgggcccgtatcgtctcgccgcagcgcctgctctccgaaggggacgtcgtcaccgactggttcgagcgctgtctggagctgcacggcggcctcgggcgctccgtcacggcggcc

SEQ ID NO: 53 - protein, 232 aa, Artificial Sequence
  Description of Artificial Sequence: Synthetic polypeptide
MTIRLYDLAATEGRRLSPFCWRSKYALAHKGLAFETEPVGFTDIPKLCGGQYKTVPIIEDGGKTVCDSWAIADYLDATYGDKPLFTSPQEKAGVRFFDTWFSLEIMTRMFRMFVLDIHDRARPEDQPYFRESREKMMRGATMEQFVAGREEKLPELRHALRPLRMTLAGQKWLGGEVPNYADYIALGGFLWAASVLTLPPLEKDDALHDWLKRGFDLYGGLGHSSKTEALAA

SEQ ID NO: 54 - DNA, 696 bp, Artificial Sequence
  Description of Artificial Sequence: Synthetic polynucleotide
atgacgatccggctctacgatctggcggcgaccgaaggccgtcgtctgagcccgttctgctggcggtccaagtacgccctggcccataaggggctggcgttcgaaaccgagccggtgggcttcaccgacatcccgaagctctgcggcggccaatacaagaccgtcccgatcatcgaagacgggggcaagacggtgtgcgattcctgggccatcgccgactacctggacgccacctatggggacaagcccctgttcacctcgccgcaagagaaggccggggtgcgcttcttcgacacctggttctccctggagatcatgacgcggatgttccgcatgttcgtcctggacatccacgatcgtgcccgcccggaagaccagccgtacttccgggagtcgcgcgagaagatgatgcgtggggcgacgatggagcaattcgtggccggccgggaggaaaagctcccggaactgcggcacgccctgcgtccgctccgtatgacgctggcgggccagaagtggctgggcggtgaggtccccaattatgcggactatatcgcgctgggcgggttcctgtgggccgcgtcggtcctgaccctgccgccgctggagaaggacgatgccctgcacgactggctgaagcgcggcttcgacctgtacggtggcctgggccacagcagcaagaccgaggccctcgcggcc

SEQ ID NO: 55 - protein, 273 aa, Artificial Sequence
  Description of Artificial Sequence: Synthetic polypeptide
MGAGFLISIGEPLFHSDPEGLIGKQALRGRRAFQVDVAMPPSLTLYELTGADDDLRFSPHCWKIRMALLHKGLEADRRPWRFTEKDAIAFSGGATVPVLVDGDKTVTDSWRIALHLEEHHADRPSLFGSETGRSYARFVNSYADTVLVAPLRHLLTLDILARVHEKDRDYFRASREKRFGQPLETHAGDPAVHIPAFRAALTPVRTVVAEQPFLSGAAPAYADYCAFGALMWARCVSPLRLLEKDDPVYGWRERMLDAFGGHARAAACTEQDA

SEQ ID NO: 56 - DNA, 819 bp, Artificial Sequence
  Description of Artificial Sequence: Synthetic polynucleotide
atgggtgcgggcttcctgatcagcatcggcgagcccctgttccacagcgaccccgagggcctgatcggcaagcaggcgctgcgcggccgtcgggccttccaggtggatgtcgccatgccgccgagcctgaccctgtatgagctgaccggcgcggacgacgacctccgtttcagcccccactgctggaaaatccgcatggccctgctgcacaaaggcctggaggcggaccgccgcccgtggcggttcacggagaaagatgccatcgccttctcggggggtgccaccgtcccggtgctcgtggacggggacaagaccgtcaccgattcgtggcggatcgcgctgcacctggaagagcaccatgccgaccggccgtccctcttcggcagcgagacgggtcggagctacgcgcgcttcgtgaactcctatgccgacacggtcctggtcgccccgctgcgccacctcctcaccctggacatcctggcgcgggtgcacgagaaagaccgcgactatttccgggcctcccgcgagaagcgcttcggccaaccgctggagacgcacgccggcgacccggcggtccatatcccggccttccgggccgccctgaccccggtccgcaccgtcgtggccgagcagccgttcctctcgggtgccgccccggcctacgcggactactgcgcgttcggtgcgctgatgtgggcgcgctgtgtcagcccgctccgcctcctggagaaggacgaccccgtctatggttggcgcgaacgcatgctggacgcgttcggcggccacgcccgtgccgcggcgtgcaccgaacaggatgcg

SEQ ID NO: 57 - protein, 238 aa, Artificial Sequence
  Description of Artificial Sequence: Synthetic polypeptide
MAAAMTAIRLYDLQVRDDRRPSPFCWRIKYALAHKGLPFDTVPIGLTDIPAIEGGAHKTVPIIDDGGKTVSDSWAIADHLDKAYPDRPPLFASPAERELCRFVEASLFVSAGRSLLMGYVKDIHDHAHERDRAYFRQTREKLLGSTLEELASGRAERLDAARAGFDSVRLTLKGGAPFLAGANPGYADYIVAGLLLWVGSIATAPFLKADDPLLVWLGRVQDLYGGLGRTSPLNAIAA

SEQ ID NO: 58 - DNA, 714 bp, Artificial Sequence
  Description of Artificial Sequence: Synthetic polynucleotide
atggccgccgccatgacggccatccgtctctacgacctccaggtgcgtgatgaccgccggccgagcccgttctgctggcgcatcaagtacgcgctggcgcacaagggcctgcccttcgataccgtgccgatcggcctgacggatatcccggcgatcgaaggcggcgcccataagacggtgccgatcatcgacgacggtggcaagaccgtgagcgacagctgggccatcgcggaccacctcgacaaggcgtaccccgaccgcccgccgctgttcgcgtccccggccgagcgcgagctgtgtcggttcgtcgaagcgtcgctgttcgtcagcgccggccgcagcctgctcatgggctacgtcaaggacatccacgaccacgcgcacgagcgcgaccgcgcctacttccgccaaacccgcgagaagctgctgggctcgaccctggaagaactggcctcgggtcgtgccgagcgcctggacgccgcgcgggcgggcttcgactcggtgcgcctgaccctgaagggcggcgcgcccttcctcgccggtgcgaaccccgggtacgccgactatatcgtggcgggcctgctgctgtgggtgggctccatcgccaccgcgccgttcctcaaggcggacgacccgctgctggtctggctgggccgcgtccaagatctctacggcggcctgggccgcacctcgccgctgaacgcgatcgccgcc

SEQ ID NO: 59 - protein, 229 aa, Artificial Sequence
  Description of Artificial Sequence: Synthetic polypeptide
MDPTLYELAGADPDRRFSPFCWRIRLALEHKGLSFAGRPWRFTEKEAIAFAGSETVPVLVDGERALAGSQAIAAHLEEAHPDRPSLFGGPAGQALTRVIVHWTDGVLHPALAPLLLTEILAVLDPRDRDYFRRTREALFRKPLEAVCPDPEAQLKLLRRTLSPVRVSLREQPYLGGEAPLYADFAVMGAFLWARGVSARPLLDPDDPVEDWRRRMLARLGPDSRALTAA

SEQ ID NO: 60 - DNA, 687 bp, Artificial Sequence
  Description of Artificial Sequence: Synthetic polynucleotide
atggacccgacgctgtatgaactggccggtgccgaccccgatcgccgcttctcgcccttctgctggcgcatccgcctcgcgctggagcacaaaggcctgagcttcgcgggccgcccgtggcggttcaccgagaaggaagccatcgccttcgccggttcggagaccgtcccggtgctggtggacggtgaacgcgccctcgccggcagccaagccatcgccgcccatctggaggaggcgcatccggatcgcccgagcctgttcggtggtccggccggccaagccctgacgcgggtgatcgtgcactggaccgacggcgtcctgcatccggcgctggcgccgctcctgctgacggagatcctggccgtgctggacccccgggaccgtgattacttccgccgcacccgcgaagcgctcttccggaagccgctggaagcggtctgcccggacccggaggcccaactcaagctgctgcgccggaccctcagcccggtccgcgtgtccctgcgcgagcagccctatctgggcggcgaagccccgctctatgcggacttcgccgtcatgggcgccttcctgtgggcccgcggtgtgtccgcccgcccgctcctcgacccggatgacccggtggaggattggcgtcgccgcatgctcgcccgcctggggccggacagccgcgccctgaccgcggcg

SEQ ID NO: 61 - protein, 238 aa, Artificial Sequence
  Description of Artificial Sequence: Synthetic polypeptide
MKAALTLYDLAGAEPDRRFSPYCWRTRLAIAHKGLTVETIPWRFTEKEALAFSGQGKVPVLVDGARTIADSWAIAEYLEDTYPDRPSLFGDGQGRALARFINHWTDSVLHPAIARLILADIHAHLHEKDQDYFRMTRERFFGATLETVCQDREERVLSFRQGLAPLRATLAAQPFLSGDRPAYADYIVFGAFQWARATSPFALLASDDPIAAWRGHMLDAFDQLARQTPGYDHNINGR

SEQ ID NO: 62 - DNA, 714 bp, Artificial Sequence
  Description of Artificial Sequence: Synthetic polynucleotide
atgaaggccgcgctgacgctgtatgacctggccggcgccgaaccggatcgtcggttctcgccctactgctggcgtacccggctggcgatcgcccacaaggggctgacggtggagacgatcccctggcgtttcaccgagaaggaggccctggccttctccgggcaaggcaaagtcccggtcctcgtcgacggcgcccgcaccatcgccgacagctgggccatcgccgagtacctggaagacacgtatccggaccgcccgtcgctgttcggtgatgggcagggccgcgccctggcgcggttcatcaatcactggaccgactccgtgctgcacccggccatcgcgcgtctcatcctggccgacatccacgcccatctccacgaaaaggaccaggactacttccggatgacccgcgagcgcttcttcggtgccacgctggaaaccgtgtgccaagaccgcgaggaacgcgtcctgtcgttccgccagggcctcgcgccgctgcgtgcgaccctggccgcccaaccgttcctgagcggcgaccgccccgcctacgcggactacatcgtcttcggtgccttccagtgggcccgcgcgacgtcccccttcgcgctgctcgcctcggacgacccgatcgccgcctggcgcggccacatgctcgacgccttcgatcaactcgcccggcagaccccgggctatgaccacaacatcaatggccgc

SEQ ID NO: 63 - protein, 204 aa, Artificial Sequence
  Description of Artificial Sequence: Synthetic polypeptide
MALAHKGLDFEEIPTTYARIREIGGGVSPTLPVLDDNGRLIPDSFAIALYLEEAYPERPSLFGGEGGKALSRLVEGYSQMIIHPAITRIALLDIHAILDEGDKAYFRESREARLGKSFEVIAADCEAEKAAFGAKLEPIRHMLKFQPFIGGQTPLFADYIVFGALQWLRVCTGFSMLAADDPVLAWFERCLDLHESRGRTVTAA

SEQ ID NO: 64 - DNA, 612 bp, Artificial Sequence
  Description of Artificial Sequence: Synthetic polynucleotide
atggcgctggcccacaaaggcctggacttcgaagagatcccgaccacgtacgcccgcatccgcgagatcggtggcggtgtgtcccccaccctgcccgtcctcgatgacaatggccgcctcatccccgactcgttcgcgatcgcgctgtacctggaagaggcgtacccggaacgcccctccctgttcggtggtgagggtgggaaagcgctgtcgcgcctggtcgaaggctacagccagatgatcatccacccggccatcacgcgcatcgccctcctcgacatccacgcgatcctggacgaaggcgataaggcgtacttccgcgagtcccgtgaagcccgcctcggcaagagcttcgaggtcatcgccgccgactgcgaggcggagaaggccgcgttcggcgccaagctggagccgatccgccacatgctcaagttccagccgttcatcggcggccagaccccgctcttcgcggactacatcgtcttcggcgcgctgcagtggctgcgcgtgtgcaccgggttctccatgctcgcggcggatgacccggtcctggcctggttcgagcgttgcctggacctgcatgaaagccgcgggcggaccgtcacggcggcg

SEQ ID NO: 65 - protein, 231 aa, Artificial Sequence
  Description of Artificial Sequence: Synthetic polypeptide
MTLKLFELVGADAGRPFSPFVWRTRMALAHKGLTAETIPWRFTDKAAIAPYGSEKVPVLLDGDKVVADSWAIANYLEDAYPDRPSLFGGDGGRAMARMLNWWGDLAIVGGIFPMIVADIAQRLDPDDAAYFRQSREARLKTTLEEVAATRDRAVEGFRKSLDPLRLTLKTQAFIGGAAPNYADYIVFGGFQWARVVSDFSLLQSDDPVYAWRERLLDAFGGLARATPGYPV

SEQ ID NO: 66 - DNA, 693 bp, Artificial Sequence
  Description of Artificial Sequence: Synthetic polynucleotide
atgaccctgaagctcttcgaactcgtgggggccgacgcgggtcgccccttctcgccgttcgtctggcgcacccggatggccctggcgcataaaggcctgacggccgaaaccatcccgtggcgcttcaccgacaaggcggccatcgcgccgtacggctccgagaaggtgccggtgctgctcgacggcgacaaggtcgtggcggacagctgggccatcgcgaattacctggaagacgcctacccggaccggccgtcgctgttcggtggtgacggcgggcgcgccatggcccgtatgctgaattggtggggcgatctggccatcgtcgggggcatcttcccgatgatcgtggccgacatcgcccagcgcctggacccggatgacgccgcgtacttccgccagtcccgcgaggcccgcctgaagacgaccctcgaagaagtcgccgcgacgcgcgaccgcgccgtggaaggcttccggaagtccctggaccccctccgcctcacgctgaagacgcaggccttcatcgggggtgcggccccgaactacgcggactacatcgtcttcggcggcttccagtgggcccgggtggtctccgacttctccctgctccaaagcgacgacccggtctatgcgtggcgcgaacgtctgctcgacgcgttcggcggcctggcccgcgccaccccgggctacccggtg

SEQ ID NO: 67 - protein, 229 aa, Artificial Sequence
  Description of Artificial Sequence: Synthetic polypeptide
MTRALYSLCGADQQHLFSPHCWKAVMALAHKGLDFEEIPTTYARIRAIGGGVSQTVPVLDDNGRLIPDSFDIALYLEEAYPERPSLFNGEGGEALSRMVEGYSQMIIHPAITRIALLDIHANLDEGDKAYFRESREARLGKSFEVVAAGSEAEKAAFGAKLEPLRHMLKFQPFIGGQAPLFADYIVFGALQWLRVCTGLTMLAADDPVLGWFERCLDLHESRGRTVTAA

SEQ ID NO: 68 - DNA, 687 bp, Artificial Sequence
  Description of Artificial Sequence: Synthetic polynucleotide
atgacccgcgcgctctacagcctgtgtggcgcggaccagcagcacctgttcagcccccactgctggaaggccgtgatggccctggcccacaaaggcctcgatttcgaagagatccccacgacctacgcgcgtatccgcgccatcggtggcggggtcagccagacggtgccggtgctggatgacaacgggcgtctgatcccggactcgttcgacatcgccctgtacctggaggaggcctatccggagcgccccagcctcttcaatggcgaaggcggcgaagccctgagccgcatggtggagggctactcgcagatgatcatccacccggcgatcacccgcatcgcgctcctggatatccacgcgaacctggacgagggcgacaaggcgtatttccgcgaatcccgggaggcccggctggggaagagcttcgaggtcgtcgccgccggctccgaggccgaaaaggcggccttcggtgccaaactggagccgctccgccacatgctcaagttccagccgttcatcggcggccaggccccgctgttcgcggattacatcgtgttcggcgccctgcagtggctgcgtgtgtgtacggggctgaccatgctggccgcggacgatccggtcctgggttggttcgaacgctgtctcgacctgcacgagtcgcgcggtcgcacggtcaccgcggcc

SEQ ID NO: 69 - protein, 231 aa, Artificial Sequence
  Description of Artificial Sequence: Synthetic polypeptide
MARRLYELAGSDPARLFSPYCWRTRMALAHKELDFESVPWRFAEKDVIGAHGSEKVPVLVDDEICVNDSWVIAEYLEKTYPDRPSLFGGEGGRAMARFINNWSDISIGQMAPFIIADIHAQLDPGDKDYFRRTREKGMGKPLEEVVAGREARLDDLRRWLHPLRMTLRTQPYLGGAKPNYADYVVFGPFQWARVTSPFELLKPDDLIHAWRERMLDLFDGMARKAPVVDAA

SEQ ID NO: 70 - DNA, 693 bp, Artificial Sequence
  Description of Artificial Sequence: Synthetic polynucleotide
atggcgcgccgcctgtatgaactggccggcagcgaccccgcgcggctcttcagcccctattgttggcggacgcggatggcgctggcgcataaggaactggacttcgagagcgtgccgtggcgcttcgccgagaaggacgtgatcggcgcccatggctccgaaaaggtccccgtcctggtcgacgacgaaatctgtgtgaacgacagctgggtgatcgcggaatatctggagaagacctacccggatcgcccgtcgctgttcggcggtgaagggggtcgcgcgatggcccgcttcatcaacaattggagcgacatcagcatcggccagatggccccgttcatcatcgccgacatccacgcgcagctcgacccgggggacaaggattacttccggcgcacccgcgaaaaggggatgggcaagccgctggaggaagtggtggccggtcgtgaggcgcgtctggacgatctgcgtcggtggctgcacccgctgcggatgaccctgcgtacccagccgtatctgggtggcgccaagccgaactacgcggattacgtcgtgttcggccccttccaatgggcgcgggtcacgagccccttcgagctgctcaagccggacgatctgatccacgcctggcgcgaacgtatgctggacctgttcgacggcatggcccgtaaggcgccggtggtggacgccgcc

SEQ ID NO: 71 - protein, 236 aa, Artificial Sequence
  Description of Artificial Sequence: Synthetic polypeptide
MNSAATTLTLYELAAADPALRFSPHCWKTRMALAHKRLDALRLPWRFTETEALAFSGQSRVPVLVNGAETIADSWRIALYLDERFPDAPSLFGAADAIAPVRFINSWADGALSPAIGRIILRDIHDRLGDADRVYFRASREIRYGQSLEDVVADRPTHLSNLQRVLAPLRETLKHQPFLSGEAPAYADYCVFGMFMWARCVSLVELLEDRDVVFAWRDRLLDAFGGLARSAPRHQP

SEQ ID NO: 72 - DNA, 708 bp, Artificial Sequence
  Description of Artificial Sequence: Synthetic polynucleotide
atgaacagcgccgccaccacgctcaccctgtatgaactggccgcggcggacccggccctccggttctccccgcattgttggaaaacccgcatggccctggcgcacaaacgcctggacgccctgcggctgccgtggcgcttcaccgagaccgaagccctggccttctcgggccaaagccgcgtccccgtcctggtcaatggtgcggagaccatcgccgactcctggcgtatcgcgctgtacctggacgaacgcttccccgatgcgccctcgctcttcggtgccgccgacgccatcgccccggtgcgcttcatcaattcctgggccgatggcgccctcagcccggcgatcggtcgcatcatcctgcgcgatatccacgaccgcctcggtgacgccgaccgcgtgtacttccgtgccagccgggagatccgctatgggcagtcgctcgaagacgtcgtggccgaccgcccgacgcatctgtcgaacctgcagcgcgtcctcgcgccgctgcgtgagaccctgaagcatcagcccttcctgagcggcgaagcgcccgcctacgcggattactgcgtgttcggcatgttcatgtgggcccgctgtgtctccctggtggaactcctggaggatcgcgacgtcgtgttcgcctggcgcgaccgcctgctggatgccttcggcggtctggcccgtagcgcgccgcgccaccaaccg

SEQ ID NO: 73 - protein, 229 aa, Artificial Sequence
  Description of Artificial Sequence: Synthetic polypeptide
MAITLYELAGADPDRRFSPFCWRIRLALEHKGLSFAGRPWRFTEKDAIAFADSGTVPVLVDGDRTIAESSVIAAYLEEAYPDRPTLFGGPAAQALTRFLVHWTDGVLHPALAPLLLRDIHAILAPQDRDYFRQSREARFGRALEAVCPDPDAQRTLLRRTLSPLRATLRLQPFLGGEGPLYADFVVMGAFLWARGVSAQALLEPDDPVEAWRLRMLARLGPESRALTSF

SEQ ID NO: 74 - DNA, 687 bp, Artificial Sequence
  Description of Artificial Sequence: Synthetic polynucleotide
atggccatcacgctctatgagctggccggcgccgatcccgatcgtcggttcagccccttctgctggcgcatccgcctggccctggagcacaaaggcctgtccttcgccggccgcccctggcgcttcacggaaaaggacgcgatcgccttcgccgattcggggaccgtgcccgtgctggtggacggcgaccgcaccatcgcggagtcctcggtcatcgccgcgtacctggaggaagcgtatccggaccgccccaccctcttcggcggccccgccgcgcaggcgctgacccgcttcctggtccactggaccgacggggtgctccatccggccctggcgccgctgctgctccgcgacatccatgcgatcctcgcgccgcaggaccgtgactacttccgccagtcccgcgaggcgcgcttcggccgtgcgctggaagccgtctgtcccgaccccgacgcgcagcgcaccctgctgcgccgcaccctgtcgcccctgcgtgcgaccctccgcctgcagcccttcctgggcggggaaggcccgctgtatgcggatttcgtcgtcatgggcgccttcctgtgggcgcgcggtgtgtcggcccaggccctgctggagccggatgacccggtggaagcgtggcgtctgcgcatgctggcccgtctcggcccggaaagccgcgccctgaccagcttc

SEQ ID NO: 75 - protein, 226 aa, Artificial Sequence
  Description of Artificial Sequence: Synthetic polypeptide
MTRLLYSLAGTDLTRPFSPHCWKIILALRHKGLSFEEKPLAFTEIPTVEEGISKLVPILRDGDTVVADSFQIALYLEEAYPDRPSLFRGEGGKALARFVEGYSQSTIHPAISSIALMDIYNMISPADQAHFRKTREALFGKVLEEIFPDRDGAIAAFPAKLQPLRHMLRSQPFIGGEKPLFADYIVFGAFQWLKIVTGSIFLPEDDPAAQWFERCAALGLVQADAA

SEQ ID NO: 76 - DNA, 678 bp, Artificial Sequence
  Description of Artificial Sequence: Synthetic polynucleotide
atgacccgcctgctgtactcgctggccggcacggatctgacgcgcccgttctcgccccactgttggaagatcatcctcgccctgcggcataagggcctgtccttcgaggagaagccgctggcgttcacggagatccccaccgtcgaagagggcatctccaagctggtcccgatcctgcgcgatggggacaccgtcgtcgccgactccttccagatcgccctgtacctggaagaggcgtatcccgatcgtccgagcctgttccgcggtgagggcggtaaagccctggcgcgcttcgtggagggctattcgcagtccaccatccatccggccatcagcagcatcgccctgatggacatctacaacatgatctcgcccgccgaccaggcgcacttccgcaagacccgcgaggccctgttcgggaaggtcctggaggagatcttcccggatcgtgacggtgccatcgccgccttccccgccaagctgcagcccctgcgccacatgctccgttcgcagcccttcatcggcggcgaaaaacccctgttcgccgactatatcgtgttcggcgccttccagtggctcaagatcgtcacgggctcgatcttcctgccggaagacgatccggccgcccagtggttcgagcggtgtgccgcgctgggcctggtccaggcggacgccgcg

SEQ ID NO: 77 - protein, 230 aa, Artificial Sequence
  Description of Artificial Sequence: Synthetic polypeptide
MDMRELYELRGSSPEVLFSPYCWRVRLALAHKGLDFVSRPVRFTDKEALAFSGQTLVPVLRDGETTVHDSLAIFRYLDERYPQPSLLGGALGESRLRLIDRLIGQDLRPALVRLLLPRVLASIDPPDRDYFRQTREKSLGMSLEAFADRDAGQAQLARALQPLDAMLKGQSWLDGAEPAGADYLIGGFFFWAWTLGEQLWPGDSPTGDWFRRLLAFCEERQGAVRRATND

SEQ ID NO: 78 - DNA, 690 bp, Artificial Sequence
  Description of Artificial Sequence: Synthetic polynucleotide
atggacatgcgggagctgtacgagctccgcggcagctcgccggaggtcctcttctcgccgtactgctggcgcgtccgcctggcgctggcccataagggcctggacttcgtcagccggcccgtgcgcttcaccgacaaagaggccctcgcgttcagcggccagaccctcgtgcccgtgctgcgcgacggcgagaccaccgtccacgattcgctggcgatcttccgctacctggacgagcgctatccgcaaccgagcctcctcggcggcgcgctgggcgagagccggctgcggctcatcgaccgcctgatcggccaggatctgcgtcccgcgctggtccggctcctcctcccgcgggtcctggcgagcatcgatcccccggaccgggactacttccgccaaacgcgcgagaagtccctgggcatgagcctcgaagcgttcgccgaccgtgacgcgggccaagcccagctggcgcgtgccctccaacccctggacgccatgctcaagggccaaagctggctggacggggccgaacccgccggggcggactacctgatcggtggcttcttcttctgggcctggaccctcggcgaacaactctggcccggggacagcccgaccggggattggttccgccgcctgctggccttctgtgaagagcgccagggggccgtgcgccgcgccaccaatgac

SEQ ID NO: 79 - protein, 229 aa, Artificial Sequence
  Description of Artificial Sequence: Synthetic polypeptide
MTRKLYALCGTDRTRPFSPHVWKTKLSLAHKGLGFDVAPIGFTEIPKLEQGATKIVPLLRDGEKLVSDSFDIALYLEEAYPERPTLFSGEGGKAMARFVEGWSQMTLHPAIGRIAIMDIHDSLEPVDRAYFRRSREERFGRPLETVAEAGKTDLETFSAKLEPLRHMLKFQPFIGGERPLFADYIVFGALQWARIVSPHRLLATGDVVSGWFERCLDLHDGLGRSVTAA

SEQ ID NO: 80 - DNA, 687 bp, Artificial Sequence
  Description of Artificial Sequence: Synthetic polynucleotide
atgacccgtaagctgtatgcgctctgtggcaccgaccgcacccggccgttcagcccgcatgtctggaagaccaagctctccctggcccacaagggcctcggcttcgacgtggcgccgatcggcttcacggaaatccccaagctggaacagggggccacgaagatcgtgcccctcctgcgggatggcgagaagctcgtcagcgacagcttcgacatcgcgctgtatctggaagaggcgtatccggagcgccccaccctgttctcgggtgaaggtggcaaggccatggcgcggttcgtcgagggttggtcgcagatgaccctgcatccggcgatcggccgcatcgccatcatggacatccacgattcgctcgaaccggtcgatcgcgcctatttccgccgctcccgtgaggagcgcttcggtcgccccctggaaaccgtggcggaagccggcaagaccgatctggagacgttctcggcgaagctggagccgctccggcacatgctgaagttccaacccttcatcggcggggaacgcccgctgttcgccgactatatcgtcttcggcgccctccaatgggcccgcatcgtgagcccccaccgcctgctcgccaccggtgacgtggtcagcggttggttcgagcgctgcctcgatctccacgacggcctcggtcggtccgtgaccgcggcc

SEQ ID NO: 81 - protein, 229 aa, Artificial Sequence
  Description of Artificial Sequence: Synthetic polypeptide
MTRALYSLCGADEQRFFSPHCWKAVMALAHKGLDFEEIPTTYAPIRAIGGGVSSIVPVLDDNGRLIPDSFDIALYLEEAYPERPSLFNGEGGKSLSRMVEGYSQMIIHPAIMRIALLDIHANLDEEDKAYFRQSREARLGKPLEVVAADSEAEKAAFGAKLEPLRHMLKFQPFIGGQTPLFADYIVFGALQWLRVSAGLAMLATDDPVMAWFERCLDLHQSRGRTVTAA

SEQ ID NO: 82 - DNA, 687 bp, Artificial Sequence
  Description of Artificial Sequence: Synthetic polynucleotide
atgacccgggccctctactcgctgtgcggcgcggatgaacagcgcttcttctccccgcattgttggaaggccgtgatggcgctcgcgcacaaggggctggacttcgaggaaatcccgacgacctacgcgcccatccgcgcgatcggtggcggcgtcagcagcatcgtccccgtcctggacgacaacggccgcctgatcccggacagcttcgacatcgccctgtatctggaggaagcctatccggagcggcccagcctgttcaacggcgagggcggcaagagcctcagccgcatggtcgagggctatagccagatgatcatccacccggccatcatgcgcatcgcgctgctcgacatccatgcgaacctggacgaggaggacaaggcctacttccgccagtcgcgggaagcccgtctgggcaaaccgctggaggtcgtcgccgcggactcggaagcggaaaaggccgcgttcggcgccaagctggagccgctccgccacatgctgaaattccagccgttcatcggcggccagaccccgctgttcgccgactacatcgtcttcggtgcgctgcaatggctgcgggtcagcgccggcctggccatgctcgccacggacgatccggtgatggcctggttcgagcgctgcctggatctgcaccaatcccggggccgcacggtcaccgccgcc

SEQ ID NO: 83 - protein, 231 aa, Artificial Sequence
  Description of Artificial Sequence: Synthetic polypeptide
MTTSRTLYSLCGSDSARPFSPHCWKTVLSLAHKGLEFEERPLPFTVIPTVEDGFSRTVPILRDGDQLVSDSFEIALYLDEAYPERPSLFNGEGGKAMARFVESWSQTVLHPAITRIAVLDIHNMLDEPDRLYFRDSRTKALGRTLEDVVANREAEIAAFPALLAPIRRMLGFQPFIGGSSPLFADYIVFGALQWARITTGADLFSENDPVRDWFEGCLDLHDARGRSVTAA

SEQ ID NO: 84 - DNA, 693 bp, Artificial Sequence
  Description of Artificial Sequence: Synthetic polynucleotide
atgaccaccagccgcaccctgtacagcctgtgcggctcggattcggcccggccgttcagcccccactgctggaagacggtgctgtcgctggcccacaagggcctggagttcgaagaacgcccgctgccgttcaccgtcatcccgaccgtggaggacggcttctcccgtacggtccccatcctgcgtgacggggatcagctggtcagcgactcgttcgagatcgcgctgtacctcgacgaggcgtacccggaacgcccgagcctgttcaacggtgaaggcggcaaagccatggcccgcttcgtcgagagctggtcccagacggtcctgcaccccgccatcacgcggatcgccgtgctggacatccacaacatgctggacgaacccgatcgcctgtacttccgcgacagccgtacgaaagccctgggccgtaccctcgaagacgtggtggccaatcgcgaggccgagatcgcggcgttcccggcgctgctggcgcccatccggcggatgctgggcttccaaccgttcatcggcggtagcagccccctcttcgccgactatatcgtgttcggtgccctgcaatgggcgcgcatcacgacgggcgcggatctgttcagcgagaacgacccggtccgcgactggttcgagggctgtctggacctccacgacgcgcgtggccgcagcgtgaccgccgcc

SEQ ID NO: 85 - protein, 232 aa, Artificial Sequence
  Description of Artificial Sequence: Synthetic polypeptide
MREPLKLYDLAGADERVRFSPNCWRTRFALAHKGLPCETVVWRFMEKDAIAFSGQGKVPVLVDGTRHVHDSWAIAIYLEDTYPDRPSLFGGAAGRGLARFVNQWTSEAVHPAIAKVVLPDLVDILHEGDRDYFRSTREAAFGTTVGALRAARDENIAALRATLRPLRSTLADQKFLAGDAPNYADHVAFSAFLWAHASTPVKILAEDDTLNAWCDRMFDAYDGLARSLPAAA

SEQ ID NO: 86 - DNA, 696 bp, Artificial Sequence
  Description of Artificial Sequence: Synthetic polynucleotide
atgcgcgaaccgctcaagctgtatgacctggccggcgccgacgagcgcgtgcgcttctcgccgaactgttggcgcacccgcttcgcgctcgcccacaagggcctgccctgtgagaccgtggtgtggcgcttcatggagaaggacgccatcgcgttcagcggccagggcaaagtccccgtcctcgtggatggcacgcgccatgtccacgactcctgggccatcgccatctacctggaggatacctacccggatcgcccctcgctgttcggtggggcggccggtcgcgggctggcccgcttcgtgaaccagtggacctcggaggccgtgcacccggcgatcgccaaagtggtcctcccggacctcgtggacatcctgcacgagggcgaccgcgactacttccgctccacccgggaagccgcgttcggcaccaccgtgggggcgctccgcgccgcgcgcgacgagaatatcgccgccctgcgtgccaccctgcgccccctgcgcagcaccctggccgatcaaaagttcctcgccggtgacgcccccaactacgccgaccatgtcgccttctccgccttcctctgggcccatgcctcgaccccggtcaagatcctggccgaggacgacacgctgaacgcgtggtgcgaccgcatgttcgatgcctacgacggcctggcccgcagcctgccggccgccgcc

SEQ ID NO: 87 - protein, 233 aa, Artificial Sequence
  Description of Artificial Sequence: Synthetic polypeptide
MRELFELCGADRELLFSPYCWRVRLALAHKGLDWQSRPIRFTDKELIAFSGQKLVPVLSDDGETLHDSLAIFTYLDQRYPQRPLLGEGLAAERARLVERLSFHMVRVPLLKILIPRVWQVIDPADREYFRSSREQALGMSLEAFADPEIGERLFREGVAPLEMWLREQPFLEGQAPGGCDYLLAGMLLWAWCLGAQPWADNSALGAWFMRILQAYEATHGPVKRAAIQVEEKQ

SEQ ID NO: 88 - DNA, 699 bp, Artificial Sequence
  Description of Artificial Sequence: Synthetic polynucleotide
atgcgcgagctgttcgagctctgcggggccgatcgcgaactgctcttctccccctactgttggcgggtccgcctggcgctcgcccataaggggctggactggcagagccgcccgatccggttcaccgacaaggaactgatcgcgttctccggccagaagctggtcccggtcctcagcgatgacggggagaccctgcacgactccctggccatcttcacctacctggatcaacgttacccccagcgtccgctgctgggggagggcctggccgccgaacgggcccgtctggtggaacgcctgagcttccacatggtgcgtgtcccgctgctcaagatcctcatcccgcgtgtctggcaggtgatcgacccggccgaccgtgaatacttccgcagctcgcgtgaacaagcgctgggcatgtcgctcgaagcgttcgcggaccccgagatcggggagcgtctgttccgcgaaggcgtcgccccgctcgaaatgtggctgcgcgaacagccgttcctcgaaggccaggcgcccggcggttgtgactatctgctggcgggtatgctgctgtgggcgtggtgtctgggtgcgcaaccgtgggcggacaatagcgccctgggggcctggttcatgcgcatcctgcaggcgtacgaagcgacgcacgggccggtcaagcgcgccgcgatccaggtcgaggagaaacaa

SEQ ID NO: 89 - protein, 273 aa, Artificial Sequence
  Description of Artificial Sequence: Synthetic polypeptide
MAKDNRITLYDLQLASGCTISPFVWRTKYALAHKGFDVDIVPGGFTGIAERTGGRSERVPVIVDDGEWVLDSWKIAEYLDERYPDRPMLFEGPSMKQLTKFLDAWLWQTAIGPWFRCYIQDYHDLSLPQDQTYVRHSRETMFLGGKTLEEVQAGREDRLPLVPPTLEPFRKLLRDTPWLGGDAPNFADYTALAVFLWTASVATTPPLTEDDPLRGWLDRGFDLYAGLGRHPGMHSLFGLRLREGDPEPFARDGAGIEVAPVNRGTARSAEMAD

SEQ ID NO: 90 - DNA, 819 bp, Artificial Sequence
  Description of Artificial Sequence: Synthetic polynucleotide
atggccaaggacaatcggatcacgctgtacgacctgcagctggcctccggctgcaccatctcgccgttcgtctggcgcaccaagtacgccctggcgcataaaggcttcgacgtggacatcgtccccggcggtttcacgggtatcgccgagcgcaccgggggccggtccgagcgcgtcccggtcatcgtggacgacggcgaatgggtgctggacagctggaagatcgcggagtacctggacgagcgttaccccgaccgcccgatgctcttcgagggcccgtcgatgaagcagctgaccaagttcctggacgcctggctgtggcagaccgccatcggtccctggttccggtgctacatccaggactaccacgacctctccctgccccaagaccagacctacgtgcgccatagccgcgagaccatgttcctgggcggcaaaaccctggaggaggtgcaggccggccgggaagaccggctcccgctggtcccgccgaccctggagccgttccgtaagctcctgcgggacaccccgtggctgggcggggacgcccccaacttcgccgactacacggcgctggcggtgttcctgtggaccgcgtcggtcgccaccacgccgccgctcacggaggatgatcccctgcgtggctggctggatcgcggcttcgacctctacgcgggcctgggtcgccatccgggcatgcatagcctgttcggcctgcgcctgcgtgagggcgatcccgaaccgttcgcccgcgacggcgccggcatcgaggtcgcgcccgtgaatcgcggcaccgcgcgttcggcggaaatggccgac

SEQ ID NO: 91 - protein, 229 aa, Artificial Sequence
  Description of Artificial Sequence: Synthetic polypeptide
MTRKLYALSGTDTSRPFSPHVWKTKLSLAHKGLAFDIAPVGFTEIPRLEQGATKIVPLLRDGEKLVSDSFDIALYLEEAYPDRPPLFSGEGGKAMARFVEGWSQTTLHPAIGRIAIMDIHDSLDPIDRAYFRASREERFGRPLEAVAEAGRGDLETFSAKLEPIRHMLKFQPFLGGDRPLFADYIVFGALQWARIVSPHRLLAAGDVVTDWFERCLDLHDGLGRSVTAA

SEQ ID NO: 92 - DNA, 687 bp, Artificial Sequence
  Description of Artificial Sequence: Synthetic polynucleotide
atgacccgcaagctgtatgcgctgagcggcaccgacaccagccgcccgttcagcccgcacgtgtggaagaccaagctgtccctggcccacaagggcctcgcgttcgacatcgccccggtgggcttcaccgaaatcccgcgcctggaacagggcgcgaccaagatcgtcccgctgctgcgcgacggtgagaagctcgtctccgactccttcgacatcgcgctctacctggaggaggcctatccggaccggccgcccctcttctcgggcgaaggcggcaaagccatggcccggttcgtggaaggctggagccaaaccaccctccaccccgccatcggccgtatcgcgatcatggacatccacgactccctggacccgatcgatcgtgcctacttccgcgcgagccgcgaagagcgcttcgggcgccccctcgaagccgtcgccgaagcgggccggggcgacctggagacgttcagcgcgaagctggagccgatccgccacatgctgaagttccaaccgttcctgggtggtgaccggccgctgttcgcggactacatcgtcttcggcgcgctgcaatgggcgcgcatcgtcagcccgcatcgcctcctcgccgccggggacgtcgtcaccgactggttcgagcggtgcctcgacctgcatgacggtctcggccgctccgtcaccgccgcc

SEQ ID NO: 93 - protein, 230 aa, Artificial Sequence
  Description of Artificial Sequence: Synthetic polypeptide
MTILLYDLVGHDEKRPFSPHCWKATMALAHKGLDISTAPTRFLEVPAVEGGISKTVPVIRDGDKIVVDSFAIALYLDEAYPDRPTLFGGEGGKAMARFIERWSQLTIHPYVTTAAIVDLHGMQDEENAAYFRRSREQRFGKRLEDVVAARDAGLAAFRAALEPLRSMLSYQPFIGGASPLFADYIVFGALQWARVASPYRLLESSDVVAQWFDRCLDLHGGLGRKVEAAA

SEQ ID NO: 94 - DNA, 690 bp, Artificial Sequence
  Description of Artificial Sequence: Synthetic polynucleotide
atgacgatcctgctgtacgacctcgtcggccatgacgaaaagcgtccgttctcgccccactgttggaaggccaccatggccctggcgcacaaaggcctggacatctccaccgcgcccacccgtttcctcgaagtgccggccgtggaaggcggcatcagcaagaccgtgccggtcatccgcgacggcgataagatcgtggtcgacagcttcgccatcgccctgtacctcgacgaagcgtacccggatcgtccgaccctcttcggcggcgaaggtggcaaggccatggcccgtttcatcgaacgctggtcgcagctgacgatccacccgtacgtgacgacggcggccatcgtcgacctgcacgggatgcaagacgaggagaatgccgcctacttccgccggtcccgcgagcagcgtttcggcaagcgcctcgaagacgtggtggccgcgcgtgatgcgggtctggccgcgttccgtgccgccctggagcccctgcgctcgatgctgagctatcagcccttcatcggcggggccagcccgctgttcgcggattacatcgtcttcggcgccctgcagtgggcgcgcgtcgccagcccgtaccgcctgctggaaagctccgatgtcgtcgcccagtggttcgaccgctgcctggacctgcacggcggtctgggccgcaaggtcgaggccgccgcg

SEQ ID NO: 95 - protein, 222 aa, Artificial Sequence
  Description of Artificial Sequence: Synthetic polypeptide
MIKLYELAGKNNLVFSPYCWRVRLALLHKQVEFSGVDTAFTEIQNISNGEFKAVPVLHDGNFALNESFDIVEYLEEKYPLKPSLFNSNEGKALAKFIETWANTLHGDIAKMAIADIHDCLQEKDKGYFKTSREKFFGNNLESIQSENHETAKVNLLSKLSILDTYLTKSEFISGSTPLYADFIVFGTLKWLIETSQVFQVSHFSEHVEKWFLKINQMYCGET

SEQ ID NO: 96 - DNA, 666 bp, Artificial Sequence
  Description of Artificial Sequence: Synthetic polynucleotide
atgatcaagctgtacgaactggccggcaaaaacaacctggtcttcagcccgtactgttggcgcgtccggctggcgctgctccataagcaagtggagttctccggggtcgatacggccttcaccgaaatccaaaacatcagcaacggggagttcaaggcggtgcccgtgctgcacgatggcaacttcgcgctgaacgagagcttcgacatcgtcgaatacctggaagagaaatacccgctgaagccctccctgttcaacagcaacgagggcaaggccctcgcgaagttcatcgaaacgtgggcgaacaccctgcatggcgacatcgccaagatggccatcgccgacatccacgactgcctgcaagagaaagacaagggctacttcaagacctcgcgcgaaaagttcttcggcaacaacctggaaagcatccagagcgagaatcacgagacggccaaggtgaacctgctgagcaagctgtccatcctggacacgtacctgacgaagtcggagttcatcagcggttccaccccgctgtacgcggacttcatcgtgttcgggaccctgaagtggctgatcgaaaccagccaggtgttccaggtctcgcacttcagcgagcatgtcgagaagtggttcctcaagatcaaccaaatgtactgtggcgagacc

SEQ ID NO: 97 - protein, 174 aa, Artificial Sequence
  Description of Artificial Sequence: Synthetic polypeptide
MPVLDDDGRLIPDSFAIALYLEEAYPERPSLFNGEGGKALSRMVEGYSQMIVHPAIMRIALLDIHAILDEGDKAYFRQSREARLGKSFDVIAAGSEAEKAAFGAKLEPLRHMLKFQPFIGGETPLFADYIVFGALQWLRVCAGLAMLAADDPVIAWFERCLDLHESRGRTVTAA

SEQ ID NO: 98 - DNA, 522 bp, Artificial Sequence
  Description of Artificial Sequence: Synthetic polynucleotide
atgccggtgctggatgatgacggccgcctgatccccgacagcttcgcgatcgcgctgtacctcgaagaagcctacccggaacgccccagcctgttcaatggggaaggcggtaaggccctgagccggatggtcgaaggttacagccagatgatcgtgcacccggcgatcatgcgcatcgcgctgctggatatccacgccatcctggacgagggtgataaggcctacttccgccaaagccgcgaagcgcgtctcggcaagagcttcgacgtgatcgccgccggtagcgaagcggaaaaggcggccttcggtgcgaagctcgaaccgctgcgtcacatgctcaagttccagcccttcatcggcggggagacgccgctgttcgcggactacatcgtgttcggcgccctccagtggctgcgtgtctgtgccggcctggcgatgctggcggccgatgacccggtcatcgcgtggttcgagcgttgtctggacctccatgagtcgcggggccggaccgtcacggccgcc

SEQ ID NO: 99 - protein, 231 aa, Artificial Sequence
  Description of Artificial Sequence: Synthetic polypeptide
MTLKLFELVGTDAARPFSPFCWRIRMALAHKGLAAETIPWRFTEKSAITPYSSEKVPVLLDGDTAVCDSWAIATYLEDAYPDRPSLFGGDGGRAMARMINAWGDVTLVAGLAPLIVADIVKLLGPDDTAYFRKSREARFGRTLEEVASTRDSAVEGFRKSLDPLRLTLKAQPFLGGAAPNYADYIAFGGFQWARAVSDFALLKPDDPVHAWRGKLLDAFGGMARNSGGYPV

SEQ ID NO: 100 - DNA, 693 bp, Artificial Sequence
  Description of Artificial Sequence: Synthetic polynucleotide
atgaccctgaagctgttcgagctggtcggcaccgatgccgcccgtcccttctcgcccttctgttggcgcatccgcatggcgctggcccataaaggtctggccgccgagacgatcccctggcgtttcacggagaaatcggcgatcaccccgtactccagcgagaaggtcccggtgctcctcgacggcgacaccgccgtctgtgacagctgggccatcgccacctatctggaagacgcctatccggaccgcccctcgctcttcggcggcgatggtggccgcgcgatggcgcgcatgatcaatgcgtggggcgatgtgaccctggtcgccggcctggccccgctgatcgtggcggacatcgtcaagctcctgggccccgacgataccgcctacttccggaagagccgcgaagcccgtttcggccggaccctcgaagaggtggcgagcacccgcgattccgcggtcgaaggcttccggaagtccctggacccgctgcgcctgacgctgaaggcccagccgttcctgggtggcgcggccccgaattatgccgactacatcgcgttcgggggcttccaatgggcccgtgccgtctccgacttcgcgctgctgaaaccggacgacccggtccacgcctggcgcggcaagctcctggatgcgttcggcgggatggcccgcaactccggcggctatccggtc

SEQ ID NO: 101 - protein, 279 aa, Artificial Sequence
  Description of Artificial Sequence: Synthetic polypeptide
MAANNTITFYDLALSTGATISPFVWATKYALKHKGFDLDVVPGGFTGILERTGGKTERLPAIVDDGEFVLDSWGIVEYLDAKYPDRPVLIPHESVAATLKALDNWFWNAAVGPWMFCFCQDYRDLSLPQDHEYVTHSREKMLGRKLEEVQAGREERLPKISAALEPLRAALAQHQWLGGSSPNYADYRIMGGILFTASVCKTPVLANDDPLRDWIERCLDLYGGLGRHPGLFPLFGLEQREGDPDLFNRAAGQGGIYKRNTGPESTRAETQRITEGMKK

SEQ ID NO: 102 - DNA, 837 bp, Artificial Sequence
  Description of Artificial Sequence: Synthetic polynucleotide
atggcggccaataacaccatcaccttctacgatctcgccctcagcaccggcgcgaccatcagcccgttcgtgtgggcgacgaagtacgcgctgaagcacaagggcttcgatctcgacgtcgtgcccggcgggttcaccggtatcctggaacgcaccggcggcaaaaccgagcggctgccggcgatcgtggacgatggtgagttcgtcctcgacagctggggcatcgtggaatacctcgacgccaaataccccgaccgccccgtgctgatcccgcacgaatcggtggccgccaccctcaaggccctggacaattggttctggaacgccgccgtcggcccgtggatgttctgcttctgtcaggactaccgcgacctgagcctcccgcaggaccatgaatacgtgacccactcccgcgaaaagatgctcggccgcaagctcgaagaggtccaggccggtcgcgaagaacgcctgcccaagatctcggccgccctcgaaccgctgcgtgcggccctggcccaacatcaatggctcggcggctccagccccaactatgccgactatcgcatcatgggtggcatcctgttcaccgcctccgtctgcaagaccccggtgctggccaacgacgacccgctgcgggactggatcgaacgttgcctggatctgtacggcggcctgggccggcacccggggctcttccccctgttcggtctggagcaacgcgagggcgatcccgacctcttcaatcgcgccgcggggcagggcgggatctacaagcgcaatacgggcccggaatcgacccgcgcggagacccagcgcatcacggagggcatgaagaag

SEQ ID NO: 103 - protein, 231 aa, Artificial Sequence
  Description of Artificial Sequence: Synthetic polypeptide
MALRLYELVGVEETRPFSPYCWRIRMALAHKGLDATSIPWRFTEKGAISPYNSEKVPVLLDGDKSVADSWAIANYLEDAYPERPSLFGGEGGRAMARMLNWWGDIAVIGGMFPLIVADIHGHLRPVDQQYFRNTREARFGKSLEQVSANRDAAVEGFRKGLDPLRLTLKSQPFVGGQAPNYADYIMFGGFQWARATSPFALLKPEDPVYAWREKMLDAFDGLARKSEGYSV

SEQ ID NO: 104 - DNA, 693 bp, Artificial Sequence
  Description of Artificial Sequence: Synthetic polynucleotide
atggccctgcgcctgtacgagctggtgggcgtggaggagacccggccgttcagcccgtactgttggcgcatccgcatggccctggcccacaagggcctggacgccacctcgatcccgtggcggttcaccgaaaagggggccatctcgccgtacaacagcgagaaagtcccggtcctgctggacggcgataagagcgtggccgactcgtgggcgatcgccaactacctggaggatgcctacccggaacgcccctcgctcttcggtggggagggtggccgtgcgatggcccgcatgctgaactggtggggcgacatcgccgtgatcggtggtatgttcccgctgatcgtggccgacatccacggccacctccgtccggtggaccagcagtacttccgtaacacccgggaggcccgcttcggcaaatccctggagcaggtcagcgcgaatcgcgacgccgccgtggaaggcttccgcaagggcctcgatccgctccgcctgacgctgaagtcgcagccgttcgtcggtggccaagccccgaactacgccgactacatcatgttcggcggcttccagtgggcccgtgccacctccccgttcgccctgctcaaaccggaggacccggtgtacgcctggcgcgagaagatgctggacgccttcgatgggctcgcgcggaagagcgaaggctacagcgtc

SEQ ID NO: 105 - protein, 236 aa, Artificial Sequence
  Description of Artificial Sequence: Synthetic polypeptide
MALQMYELSGRDERLRFSPYCWRVRYALAHKGLECDFIPWRFTQKEAIAFSGQGKVPVLVDGETTVTDSYEIFRYLDREYPDKPLLGDDTAESRARFFKMYSERALAPGMLRTIVMDLFNVVHPDDQAYFRETREKALGRSLEEMHAPSKGLTALDAALEPLRARLEEADFLDGEAPAAADYLIFGHFMWARCVSAADLVSNADPVHAWIERMLDLHGGVGRNATRIVDIEGGYPG

SEQ ID NO: 106 - DNA, 708 bp, Artificial Sequence
  Description of Artificial Sequence: Synthetic polynucleotide
atggcgctgcagatgtacgagctgtccggccgcgacgaacgcctccgcttcagcccgtattgttggcgggtgcgttacgccctcgcgcacaagggcctggaatgcgacttcatcccctggcgcttcacccaaaaggaagccatcgcgttctcgggccagggcaaggtgccggtcctcgtcgacggtgagaccaccgtcaccgacagctacgagatcttccgctacctggaccgcgaatacccggacaagcccctgctcggcgacgacaccgcggagagccgcgcccgcttcttcaagatgtactcggagcgcgccctggcgccgggcatgctgcggaccatcgtcatggacctgttcaacgtggtccatccggacgaccaagcctacttccgcgagacccgcgagaaggcgctgggccgctccctggaagagatgcacgccccgagcaaagggctcacggcgctcgatgcggccctggaaccgctgcgtgcccgcctggaagaggccgacttcctggacggcgaagcccccgcggcggcggactacctgatcttcggccatttcatgtgggcccgctgcgtctcggcggccgacctggtctccaacgccgacccggtgcacgcctggatcgagcgcatgctggatctgcatggcggcgtgggccgtaacgcgacccgtatcgtcgacatcgagggcggttacccgggc

SEQ ID NO: 107 - protein, 232 aa, Artificial Sequence
  Description of Artificial Sequence: Synthetic polypeptide
MVIKLYDLVAAEENRAFSPFCWRIRMALAHKNLEVKIIPWRLTEKEAIAFSNQETVPVIVDGNKGDKVVADSWNIANYLEETYPDKPSLFGSYEAKSQTMFIDSWNSSLLGILAPIVLYDVFENIDPKDQPYFRESRESFLGKSLEEFKDVTENQINNFQSFLEPLRNTISQQFFLAGETPNYADYLVFSTFQFARAMSPKKLLETSDPVYAWREKMLDLFDGIGRKNLGFN

SEQ ID NO: 108 - DNA, 696 bp, Artificial Sequence
  Description of Artificial Sequence: Synthetic polynucleotide
atggtcatcaagctgtacgatctggtggcggcggaagaaaaccgtgcgttcagccccttctgctggcgcatccggatggccctggcccacaagaacctggaagtcaagatcatcccctggcgtctgaccgagaaagaggccatcgcgttctccaaccaagagaccgtcccggtgatcgtcgatggcaacaagggcgacaaggtcgtggcggacagctggaacatcgccaattacctggaggagacctatcccgacaagccctccctgttcggctcgtacgaggccaagagccagaccatgttcatcgactcctggaactcgtcgctgctgggcatcctggccccgatcgtgctgtacgatgtgttcgagaacatcgacccgaaggatcagccctacttccgcgaaagccgcgagagcttcctgggcaagagcctggaagagttcaaggacgtcaccgagaaccagatcaacaacttccagtcgttcctggaacccctgcgcaacacgatctcccagcagttcttcctggccggggaaacccccaactacgccgactacctcgtcttcagcaccttccagttcgcccgtgccatgagcccgaagaagctcctggagacctcggaccccgtgtatgcgtggcgcgagaagatgctggacctgttcgacgggatcggccgcaaaaacctggggttcaac

SEQ ID NO: 109 - protein, 229 aa, Artificial Sequence
  Description of Artificial Sequence: Synthetic polypeptide
MTRALYSLCGADERRFFSPHCWKAVMALAHKGLDFEEIPTTYARIRAIGGGVSSIVPVLDDNGRLIPDSFHIALYLEEAYPERPSLFNGEGGKALSRMVEGYSQMIIHPAIMRIALLDIHANLDEEDKAYFRQSREARLGKPLEVVAADSEAEKAAFGAKLEPLRHMLKFQPFIGGQTPLFADYIVFGALQWLRVSAGLAMLAADDPVMAWFERCLSLHQSRGRTVTAA

SEQ ID NO: 110 - DNA, 687 bp, Artificial Sequence
  Description of Artificial Sequence: Synthetic polynucleotide
atgacgcgcgccctgtactcgctgtgcggcgccgatgagcgtcgcttcttctccccgcactgctggaaggccgtcatggcgctggcccacaaaggtctggacttcgaggagatccccaccacctacgcccgtatccgcgcgatcggcggcggtgtctcgtcgatcgtgccggtcctcgatgacaatggccggctgatcccggacagcttccatatcgccctctacctggaggaagcctatcccgagcgcccgagcctgttcaacggcgagggtggcaaggccctgtcgcgtatggtcgagggctatagccagatgatcatccacccggccatcatgcgcatcgccctcctggacatccatgcgaatctcgacgaggaggacaaggcctatttccgtcagtcgcgtgaggcccgcctcggcaagccgctggaagtggtggcggccgacagcgaggccgaaaaagccgccttcggcgccaagctggaaccgctccgtcacatgctgaagttccagcccttcatcggcggccagacgccgctgttcgccgattacatcgtcttcggcgcgctgcagtggctccgtgtctcggcggggctggcgatgctggcggcggacgatccggtcatggcctggttcgaacggtgcctgagcctgcaccaatcccgggggcgcacggtcaccgcggcg

SEQ ID NO: 111 - protein, 231 aa, Artificial Sequence
  Description of Artificial Sequence: Synthetic polypeptide
MTLKLFELVGAEEARPFSPFCWRIRMALAHKGLTAQSIPWRFTEKDAISPYKSEKVPVLLDGDKSVCDSWAIANYLEQAYPDRPSLFGGEGGHAMARMLNWWGDIAVVGGMFPFIVADIFGHLRPQDQDYFRSSREARFGKTLEQVQAGRDAAVEGFRKGLDPMRLTLKSQPFLGGEAPNYADYIMFGGFQWARAVSPFPLLKPEDPVYAWREKLLDAFDGLARCSAGYPV

SEQ ID NO: 112 - DNA, 693 bp, Artificial Sequence
  Description of Artificial Sequence: Synthetic polynucleotide
atgacgctcaagctcttcgagctggtgggcgccgaagaagcccgtccgttctcgccgttctgttggcgcatccgcatggccctggcgcataagggcctgacggcccagagcatcccctggcgtttcaccgagaaggacgccatctcgccgtataagtccgagaaggtcccggtcctgctcgatggcgacaagtcggtctgtgactcgtgggccatcgccaattacctggaacaggcctatccggatcggccgtccctcttcggcggtgaaggtggccacgccatggcgcgcatgctcaattggtggggtgacatcgccgtcgtcggcggcatgttccccttcatcgtcgccgacatcttcgggcacctccgcccccaggaccaagactacttccgcagctcgcgcgaagcccgcttcggcaagaccctggaacaagtccaagccgggcgtgacgcggccgtggaaggcttccggaaagggctcgaccccatgcgcctgaccctcaagtcgcagccgttcctgggcggtgaggccccgaattacgccgactacatcatgttcggcggcttccagtgggcccgggcggtctcccccttcccgctgctgaaacccgaggacccggtgtatgcgtggcgcgaaaagctgctggacgcgttcgatggcctggcccgttgtagcgccggctacccggtc

SEQ ID NO: 113 - protein, 226 aa, Artificial Sequence
  Description of Artificial Sequence: Synthetic polypeptide
MGGIALYSLCAADGVRHYSPHVWKAILALRHKGLEFDLRPVSFADIPRIAGGGFDSVPVLDDRGHRLGDSFGIALHLEAAHSGPSLFPGAGQQALARLVEHHCDTVLNPPLSVIVVRRMHDMMDPPDQAHFRAARQRRFGASVEELAARSAGEAAHFPEKLALMRRILTGQDWVAGEAPGFADHILFGTLQWHRICMGAPLLTAKDPVEQWFRRCAAHYAIPLASG

SEQ ID NO: 114 - DNA, 678 bp, Artificial Sequence
  Description of Artificial Sequence: Synthetic polynucleotide
atgggtggcatcgccctctactcgctgtgcgccgcggacggggtgcggcactattcgccgcacgtctggaaggcgatcctggccctgcgccacaaaggcctggagttcgacctgcgcccggtgtccttcgccgatatcccgcgcatcgcgggcggcggtttcgattcggtgccggtcctggacgaccggggccaccgcctcggggacagcttcggtatcgccctgcatctggaggcggcccattcggggccctcgctcttcccgggtgcgggccaacaagccctggcgcggctggtcgaacatcactgcgacaccgtcctgaatccgccgctgagcgtgatcgtcgtccgccggatgcacgacatgatggacccgccggaccaggcccatttccgggccgcgcgtcagcgccgcttcggcgcgtcggtcgaggagctggcggcgcggagcgccggggaagccgcccatttcccggagaaactggcgctcatgcgtcgtatcctgaccggtcaagactgggtcgccggtgaggcgccggggttcgcggaccatatcctgttcggcacgctccagtggcaccgtatctgcatgggcgccccgctgctgaccgccaaggaccccgtggaacagtggttccggcgctgtgcggcccactatgcgatcccgctcgccagcggc

SEQ ID NO: 115 - protein, 207 aa, Artificial Sequence
  Description of Artificial Sequence: Synthetic polypeptide
MALNHKGLEYDLIPVSFADIPSVEDGSYSSVPVLRDGNTVLGESFDIARYLDETYADAPALFDGKGAVALTRFVESYCKTVLHPSLATIAVMDMHNLMSPADQVYFRSARERRFGMPLEVMAEGGEAERALLPEKLSPVCDLLSTQDWLSGAMPAYADYTLFGTLQWCNVCAPNTLFEKDDLVSHWFERCLDLYDGVGRNPAQSDRH

SEQ ID NO: 116 - DNA, 621 bp, Artificial Sequence
  Description of Artificial Sequence: Synthetic polynucleotide
atggcgctcaatcacaagggcctggagtacgacctgatccccgtgtcgttcgccgacatcccgtcggtggaggacggctcctacagcagcgtcccggtgctccgcgacggcaacaccgtcctgggggagtccttcgacatcgcgcgctatctggacgagacgtacgccgacgcccccgccctgttcgacggcaagggcgcggtcgccctgacccgcttcgtcgaatcgtactgcaagaccgtgctgcatccgagcctcgccaccatcgccgtcatggacatgcacaacctcatgagccccgccgatcaggtgtatttccgttcggcgcgcgaacgtcggttcggtatgcccctcgaagtgatggccgagggcggcgaagcggaacgcgccctcctgccggaaaaactgtcccccgtctgcgatctgctgagcacgcaggactggctgtccggtgccatgcccgcctacgccgactacacgctgttcggtaccctgcagtggtgcaatgtctgcgcccccaacaccctcttcgagaaggacgacctggtctcccattggttcgagcgctgcctggatctgtacgacggggtcggccgcaatccggcgcaaagcgatcgccat

SEQ ID NO: 117 - protein, 207 aa, Artificial Sequence
  Description of Artificial Sequence: Synthetic polypeptide
MALNHKGLEYDLIPVSFADIPSVEDGSYSSVPVLRDGNTVLGESFDIARYLDETYADAPALFDGKGAVALTRFVESYCKTVLHPSLATIAVMDMHNLMSPADQVYFRSARERRFGMPLEVMAEGGEAERALLPEKLSPIRDLLATQDWLSGAMPAYADYTLFGTLQWCNVCAPNTLFEKDDLVSHWFERCLDLYDGVGRNPAQSDRH

SEQ ID NO: 118 - DNA, 621 bp, Artificial Sequence
  Description of Artificial Sequence: Synthetic polynucleotide
atggcgctgaaccacaaggggctcgaatacgacctgatccccgtctcgttcgccgatatcccgagcgtcgaggacggcagctattcgtccgtgccggtgctgcgcgacgggaacacggtcctgggcgagtcgttcgacatcgcccgttacctggacgagacctacgccgacgcccccgccctcttcgacggcaaaggtgcggtcgccctgacccgcttcgtggagagctattgcaagaccgtgctgcacccgagcctggcgaccatcgcggtcatggacatgcacaacctgatgtcgcccgccgaccaggtctacttccgttccgcgcgcgaacgccgtttcgggatgccgctcgaagtcatggccgaaggcggcgaagcggagcgggccctcctgcccgaaaaactgtccccgatccgcgacctgctggcgacccaagactggctcagcggcgccatgccggcctatgccgactacaccctcttcggcaccctgcaatggtgcaacgtgtgtgcgccgaacaccctgttcgaaaaggacgacctggtgtcccactggttcgagcgctgcctggacctgtacgacggcgtcggccgtaatcccgcccagtccgaccgccat

SEQ ID NO: 119 - protein, 230 aa, Artificial Sequence
  Description of Artificial Sequence: Synthetic polypeptide
MTITLYELAGTDLSRPFSPHCWKTAMALAHKGLDFDRKTVSVTQVPQVEGGVSKTVPVIRDGSRVVADSFLIADYLEETYPDRPSLFGGEGGQAMARFVESWSQSTLHAALNVIALQEIHDRLAPEDQAYFIPSREARLGKSFDEVAALRDAEIAGFSAKLTPLRVMLKSQPWIGGSSPLFADYIVFGALQWVRLVSTARLLEEGDAVTDWFERCLDLHGGLGRSAPAAG

SEQ ID NO: 120 - DNA, 690 bp, Artificial Sequence
  Description of Artificial Sequence: Synthetic polynucleotide
atgacgatcaccctgtatgaactcgccggcacggacctgtcgcgcccgttctccccgcattgttggaagaccgccatggcgctggcccacaagggcctcgacttcgaccgcaagaccgtgagcgtgacccaggtgccccaggtggagggcggcgtcagcaagaccgtgccggtgatccgggacgggagccgtgtcgtcgcggatagcttcctgatcgcggactacctggaggaaacctatccggaccgtccgagcctgttcggcggtgagggcggtcaggccatggcccgcttcgtcgagtcgtggtcgcagtcgaccctgcatgccgccctcaatgtgatcgccctccaggagatccacgatcgcctcgccccggaggaccaggcgtacttcatcccgtcgcgtgaagcgcgcctgggcaagagcttcgatgaggtcgccgccctgcgggatgccgagatcgccggcttctccgccaaactgaccccgctgcgggtcatgctgaagtcgcagccgtggatcggcggcagcagccccctgttcgccgattatatcgtcttcggcgccctccagtgggtccgcctggtgtcgaccgcgcgtctgctggaggaaggtgacgccgtcaccgactggttcgaacgttgtctcgacctccacggcggtctcggtcggtcggcccccgcggccggc

SEQ ID NO: 121 - protein, 229 aa, Artificial Sequence
  Description of Artificial Sequence: Synthetic polypeptide
MTITFYDLCGRDSKRFSPYGWRTRMALAHKGLDYTLELVKFTEKDKIAFSGQPLVPVIRDGERVIHDSWVIAEHLEDTYPQRPSLFGSAEGRGMAKAINSFVNLTVQPLLAPLIVADVVAHVDAADSDYFVSSREKRFGKALPEVQVGREETVEGFRKALEPIRIVVKDQPFIGGVAATYADYALFGTLQWARCTSGFRVVAADDPIHAWFERVLDLHNGVGRGEPAAV

SEQ ID NO: 122 - DNA, 687 bp, Artificial Sequence
  Description of Artificial Sequence: Synthetic polynucleotide
atgaccatcaccttctacgacctgtgcggtcgcgactccaagcgtttcagcccctacggctggcggacccgcatggccctcgcccacaagggcctcgattacaccctggagctggtgaagttcacggagaaggacaagatcgccttcagcgggcagcccctggtcccggtcatccgggacggcgagcgggtgatccacgacagctgggtcatcgcggagcacctcgaagacacctacccccagcgtccgagcctgttcggctccgccgaggggcggggcatggccaaggccatcaacagcttcgtcaacctcaccgtgcaaccgctgctggcgcccctgatcgtggccgatgtggtggcccacgtggacgccgcggattccgactacttcgtgagcagccgcgagaagcgcttcggcaaggcgctcccggaagtgcaggtcggccgcgaggaaaccgtcgaaggcttccggaaggccctggaacccatccgtatcgtggtgaaggaccagcccttcatcgggggcgtggccgccacctatgcggactacgcgctgttcggcaccctgcagtgggcccgctgtacgagcgggttccgcgtggtggcggccgacgatccgatccatgcgtggttcgagcgcgtgctggacctgcacaacggtgtggggcgcggcgagccggccgccgtc

SEQ ID NO: 123 - protein, 229 aa, Artificial Sequence
  Description of Artificial Sequence: Synthetic polypeptide
MTRALYSLCGADERRFFSPHCWKAVMALAHKGLDFEEIPTTYARIREIGGGVSPTLPVLDDNGRLIPDSFAIALYLEEAYPTRPSLFNGEGGKALSRMVEGYSQMIIHPAIMRIGLLDIHAILDEGDKAYFRESREARLGKSFDVIAADSEAEKAAFGAKLEPLRHMLKFQPFIGGQTPLFADYIVFGALQWLRVCTGLAMLAADDPVLGWFERCLDLHESRGRTVTAA

SEQ ID NO: 124 - DNA, 687 bp, Artificial Sequence
  Description of Artificial Sequence: Synthetic polynucleotide
atgacccgcgccctgtactccctgtgcggcgcggatgagcgtcgcttcttcagcccgcactgctggaaggcggtcatggcgctcgcccacaaggggctggacttcgaggagatcccgaccacctacgcgcgcatccgcgaaatcggtggcggcgtgtcgccgaccctgcccgtcctcgacgataacggccgcctcatcccggactcgttcgcgatcgcgctgtacctggaggaagcgtacccgacccgccccagcctgttcaatggcgaaggcggcaaggcgctgtcccgcatggtcgagggctactcgcagatgatcatccacccggccatcatgcgtatcgggctgctggacatccacgcgatcctggacgagggcgacaaggcgtatttccgcgaatcgcgcgaggcccgcctgggcaagtccttcgatgtgatcgccgccgactccgaagccgaaaaggccgccttcggcgccaagctcgaacccctccgtcacatgctgaagttccaaccgttcatcggcggccagaccccgctgttcgccgattacatcgtcttcggcgcgctccagtggctgcgcgtctgcaccgggctggccatgctggcggcggacgatccggtgctgggctggttcgaacgctgtctggacctccatgaaagccgtggtcgcacggtgaccgccgcg

SEQ ID NO: 125 - protein, 229 aa, Artificial Sequence
  Description of Artificial Sequence: Synthetic polypeptide
MTRALYSLCGADERRFFSPHCWKAVMALAHKGLDFEEVPTTYARIREIGGGVSPTLPVLDDNGRLIPDSFAIALYLEEAYPERPSLFGGEGGKALSRLVEGYSQMIIHPAITRIALLDIHAILDEGDKAYFRESREARLGKSFEVIAADCEAEKAAFGAKLEPIRHMLKFQPFIGGQTPLFADYIVFGALQWLRVCTGFSMLAADDPVLAWFERCLDLHESRGRTVTAA

SEQ ID NO: 126 - DNA, 687 bp, Artificial Sequence
  Description of Artificial Sequence: Synthetic polynucleotide
atgacccgcgcgctgtactcgctctgtggcgccgatgagcgccgcttcttcagcccccactgttggaaggcggtgatggccctggcccataagggcctcgacttcgaggaggtgccgaccacctacgcgcgcatccgcgaaatcggcggcggtgtctcgcccaccctcccggtcctggacgacaatggccgcctgatcccggactccttcgccatcgcgctctacctggaagaggcgtatcccgagcgcccctccctgttcggtggcgagggtggcaaggccctgagccggctcgtcgagggctactcccagatgatcatccatcccgcgatcacccgtatcgcgctgctcgacatccatgcgatcctggacgagggcgacaaggcctacttccgcgagagccgcgaagcgcgcctgggcaaatcgttcgaggtcatcgcggcggactgcgaagcggagaaggcggcgttcggggccaaactcgaacccatccgccacatgctgaagttccaaccgttcatcgggggccaaaccccgctcttcgcggactacatcgtcttcggggcgctccaatggctgcgcgtgtgcaccggcttcagcatgctggcggccgacgatcccgtgctggcctggttcgagcgctgcctcgacctgcacgagtcgcgcggtcgtaccgtcaccgccgcg

SEQ ID NO: 127 - protein, 229 aa, Artificial Sequence
  Description of Artificial Sequence: Synthetic polypeptide
MTRALYSLCGADERRFFSPHCWKAVMALAHKGLDFEEIPTTYARIREIGGGVSPTLPVLDDNGRLIPDSFAIALYLEEAYPERPSLFGGEGGKALSRLVEGYSQMIIHPAITRIALLDIHAILDEGDKAYFRESREARLGKSFEVIAADSEAEKAAFGAKLEPIRHMLKFQPFIGGQTPLFADYIVFGALQWLRVCTGFSMLAADDPVLAWFERCLDLHESRGRTVTAA

SEQ ID NO: 128 - DNA, 687 bp, Artificial Sequence
  Description of Artificial Sequence: Synthetic polynucleotide
atgacccgcgccctgtatagcctgtgcggcgccgacgaacggcgtttcttcagcccccattgctggaaggccgtgatggcgctggcgcacaaggggctggacttcgaagagatcccgaccacctatgcccgtatccgcgagatcggtggtggtgtctccccgaccctcccggtcctggatgacaatggccgcctgatcccggattcgttcgccatcgcgctgtacctggaggaggcctacccggaacgcccgtccctgttcggcggtgaaggcggcaaagccctcagccgcctggtcgagggctactcgcaaatgatcatccatccggccatcacccgcatcgcgctcctcgacatccacgcgatcctggacgagggcgataaggcgtacttccgcgaatcccgtgaagcgcgcctgggcaagagcttcgaggtcatcgccgcggactcggaggcggaaaaagcggccttcggtgcgaagctggagccgatccgccacatgctcaagttccagccgttcatcgggggccagaccccgctgttcgcggattacatcgtcttcggcgccctgcaatggctgcgcgtgtgtaccggcttcagcatgctggccgccgacgacccggtgctcgcgtggttcgaacgctgcctggacctccacgagagccggggtcgcacggtgaccgccgcc

SEQ ID NO: 129 - protein, 229 aa, Artificial Sequence
  Description of Artificial Sequence: Synthetic polypeptide
MTRALYSLCGADERRFFSPHCWKAVMALAHKGLDFEEIPTTYARIREIGGGVSPTLPVLDDNGRLIPDSFAIALYLEEAYPKQPSLFNGEGGKALSRMVEGYSQMIIHPAIMRIGLLDIHAILDEGDKAYFRESREARLGKSFDVIAADSEAEKAAFGAKLEPLRHMLKFQPFIGGQTPLFADYIVFGALQWLRVCTGLAMLAADDPVLGWFERCLDLHESRGRTVTAA

SEQ ID NO: 130 - DNA, 687 bp, Artificial Sequence
  Description of Artificial Sequence: Synthetic polynucleotide
atgacccgggcgctgtactcgctgtgcggggccgacgagcgtcggttcttctccccgcactgctggaaggccgtgatggcgctggcgcataagggcctggacttcgaggagatccccacgacctatgcgcgtatccgcgaaatcgggggcggtgtcagcccgaccctgcccgtcctggacgataatgggcgcctgatcccggacagcttcgccatcgccctgtacctcgaagaggcctaccccaagcaaccgagcctgttcaatggcgaagggggcaaagccctcagccgcatggtcgagggttactcccagatgatcatccacccggccatcatgcggatcggcctcctggacatccacgccatcctggacgaaggcgacaaggcctacttccgtgaatcccgcgaagcccgcctggggaagtcgttcgacgtcatcgccgcggacagcgaggccgagaaggccgcgttcggcgccaaactggaaccgctccgccacatgctcaagttccaacccttcatcgggggccaaaccccgctgttcgcggactacatcgtcttcggcgcgctccaatggctgcgtgtctgcaccggcctggcgatgctcgccgccgacgatccggtgctgggctggttcgaacgctgcctggacctgcacgaatcgcggggccgtaccgtcaccgcggcc

SEQ ID NO: 131 - protein, 229 aa, Artificial Sequence
  Description of Artificial Sequence: Synthetic polypeptide
MTRALYSLCGADERRFFSPHCWKAVMALAHKGLDFEEIPTTYVRIREIGGGVSPTLPVLDDNGRLIPDSFAIALYLEEAYPERPSLFNGEGGKALSRMVEGYSQMIVHPAIMRIALLDIHAILDEGDKAYFRQSREARLGKSMEVIAAGSEAEKAAFGAKLEPLRHMLKFQPFIGGETPLFADYIVFGALQWLRVCAGLAMLAADDPVIAWFERCLDLHESRGRTVTAA

SEQ ID NO: 132 - DNA, 687 bp, Artificial Sequence
  Description of Artificial Sequence: Synthetic polynucleotide
atgacccgggccctctacagcctgtgcggcgccgacgagcgccgtttcttcagcccccactgctggaaggccgtgatggccctcgcgcataagggcctggacttcgaggagatcccgaccacctatgtccgcatccgcgagatcggcggtggcgtcagcccgaccctgccggtcctggatgacaatgggcggctcatccccgacagcttcgcgatcgcgctgtatctggaagaagcctaccccgagcgcccgtcgctgttcaacggcgagggtggtaaggccctcagccgcatggtcgaggggtacagccagatgatcgtccaccccgccatcatgcgcatcgccctgctggacatccatgcgatcctggacgaaggcgacaaggcctacttccgccaaagccgtgaggcccgcctcggcaagagcatggaagtcatcgcggcggggtccgaggcggagaaagcggccttcggcgccaagctggagccgctgcgccacatgctgaagttccagccgttcatcggcggcgagaccccgctgttcgccgactacatcgtgttcggtgcgctccaatggctgcgggtgtgcgccgggctcgcgatgctggcggcggatgaccccgtgatcgcctggttcgagcgctgcctggatctccacgaaagccgtggccgtaccgtcaccgcggcc

SEQ ID NO: 133 - protein, 232 aa, Artificial Sequence
  Description of Artificial Sequence: Synthetic polypeptide
MQRILYSLSGASGQHYSPHVWKIIMSLKHKGLAFDLKPVSFGDIASIEDGSYSSVPVLNDQGTLLGDSFEIAQYLEATYNDTPSLFDGAGGLHLSRFVESYCKTVLHPTLAVIAVMDMYNIMSDADRIYFRAAREKRFGMPLEDVYANRNAELATLPEKLNPVRDLLATQDWLGGEKAMHADYVLFGTLQWCNVCCADPFFAATDPVQMWFERMLDLHDGVGRKAVSEAVAA

SEQ ID NO: 134 - DNA, 696 bp, Artificial Sequence
  Description of Artificial Sequence: Synthetic polynucleotide
atgcaacgcatcctctacagcctgtcgggcgcgtcggggcagcactacagcccgcacgtctggaagatcatcatgtcgctcaagcacaaaggcctggcgttcgatctgaagccggtgtcgttcggtgacatcgcctcgatcgaagacggcagctactccagcgtcccggtcctcaacgatcagggcaccctcctgggcgattccttcgaaatcgcgcagtacctggaggcgacgtacaacgataccccctccctgttcgatggcgccgggggcctgcatctgagccggttcgtcgagtcctactgcaagacggtgctgcacccgaccctggccgtcatcgccgtgatggacatgtacaacatcatgtccgacgcggaccgcatctacttccgtgccgcccgcgagaagcgcttcggtatgccgctcgaagacgtctatgcgaaccgcaacgcggagctggccacgctgccggaaaagctgaaccccgtgcgcgacctgctggcgacccaggattggctgggtggtgagaaggccatgcatgcggactacgtgctcttcggcaccctgcagtggtgcaacgtgtgctgcgccgaccccttcttcgccgcgaccgatccggtgcagatgtggttcgagcggatgctcgacctgcacgacggggtcggccgtaaggccgtgtccgaggccgtcgcggcc

SEQ ID NO: 135 - protein, 244 aa, Artificial Sequence
  Description of Artificial Sequence: Synthetic polypeptide
MRTTNPWKEHGTLTPDLTLYDLAGADETLRFSPHCWKTHMALAHKGLTAQTVPWRFTEKEKIEFSGQKLVPVLVHDQHVVSDSWRIACYLEDTFPERPSLFGGDGGRAVSLFANSWADTTLVPVLARLLLPAIHGLIHEQDKDYFRASREKRFGPIEDLPSGYAEQIQALRAALLPLRHTLGKQPFLSGAQHGYADYAVFGMFMWARCTSTLELLEPDDLVYAWRERLLDAFDGLARRAPAVWG

SEQ ID NO: 136 - DNA, 732 bp, Artificial Sequence
  Description of Artificial Sequence: Synthetic polynucleotide
atgcgtacgaccaatccgtggaaggagcacggcaccctgaccccggatctcaccctctacgacctggcgggggccgacgaaaccctgcgcttctcgccccactgctggaagacccacatggcgctggcccacaagggcctgaccgcgcagaccgtcccctggcgcttcaccgagaaggaaaagatcgagttcagcgggcagaagctggtccccgtgctcgtccacgaccagcatgtcgtcagcgattcctggcgcatcgcctgctacctcgaagacaccttcccggaacgtccgagcctgttcggcggggacggcgggcgtgccgtgtccctgttcgccaacagctgggccgacaccaccctcgtcccggtgctggcccgcctgctgctgccggcgatccatggcctgatccacgagcaggacaaagactacttccgggcctcgcgcgaaaaacgcttcgggccgatcgaggatctgccgagcgggtacgccgaacaaatccaggccctgcgtgcggcgctgctgcccctccgccacaccctgggcaaacagcccttcctgtccggtgcgcagcatgggtatgccgactacgcggtgttcgggatgttcatgtgggcccgctgcacgtcgaccctggaactgctggaaccggacgacctggtgtacgcgtggcgtgaacgcctgctggatgccttcgatggcctggcccgccgggcgccggccgtgtggggc

SEQ ID NO: 137 - protein, 229 aa, Artificial Sequence
  Description of Artificial Sequence: Synthetic polypeptide
MARRLYELVGEDPARRFSPFCWRSRMALAHKGLEAECVPWRFTEAAALAFSGQDKVPVLVDGDRVVSDSWAIAAYLEAAYPERPALFAGRDPAAARLSAAWADAALLPLLGRLIISDILPWLGEGQRDYFRASREARFGMTLEQITADREERVGAFRAALAPMRLVLKGQPFLGGAAPDYADYAVFGNFQWARCVSAFPLLEAEDIVAAWRERMLDLFGGLARDVPHCG

SEQ ID NO: 138 - DNA, 687 bp, Artificial Sequence
  Description of Artificial Sequence: Synthetic polynucleotide
atggcccgccgtctctatgaactggtgggggaggaccccgcgcgccggttctcgccgttctgttggcgcagccggatggccctcgcgcataaaggcctggaggcggaatgtgtgccgtggcgcttcaccgaggccgcggcgctggccttctcgggccaggataaggtccccgtcctggtcgacggtgaccgggtcgtctcggactcctgggcgatcgcggcctatctggaggcggcgtacccggagcgcccggccctcttcgcgggtcgcgatccggccgccgcccggctgagcgccgcctgggccgatgcggcgctgctcccgctgctcgggcgcctgatcatctccgacatcctgccgtggctgggcgagggtcagcgggactacttccgcgccagccgtgaggcccgcttcggcatgaccctggagcaaatcaccgcggaccgcgaggagcgcgtgggcgcgttccgtgccgcgctggccccgatgcgcctcgtgctcaagggccagccgttcctgggtggggcggcgccggactacgccgattatgccgtcttcggcaacttccaatgggcgcgctgcgtgagcgccttcccgctgctggaggccgaggacatcgtcgccgcctggcgcgagcgcatgctggacctgttcggtggtctggcgcgggatgtgccccactgcggc

SEQ ID NO: 139 - protein, 231 aa, Artificial Sequence
  Description of Artificial Sequence: Synthetic polypeptide
MARQLYELAGSDPARLFSPYCWRTRMALAHKGLAFETVPWRFAQKDAIKAHGSEKVPVLVDGEARVNDSWTIAEYLEDTYPDKPSLFGGEGGRGMARLLNNWSDVSVGQIAPFIIADIHDQLDAGDKDYFRRTREKNMGRPLEEVVAGREQRLESLHKWLHPLRMTLRTQRFIGGAKPNYADYIVFGPFQWARVTSPFELLKPDDLIHAWRERMLDLFDGMARKAPVVEAA

SEQ ID NO: 140 - DNA, 693 bp, Artificial Sequence
  Description of Artificial Sequence: Synthetic polynucleotide
atggcccgccagctgtatgagctggcgggttccgacccggcgcgcctgttctccccgtattgctggcgcacccgtatggcgctcgcccataagggtctggcgttcgaaaccgtcccctggcgcttcgcccagaaggacgcgatcaaagcccatggctccgagaaggtgcccgtgctcgtcgacggcgaggcccgcgtcaacgactcctggaccatcgccgagtacctggaggacacctatcccgacaagccgagcctgttcggcggggagggcggtcgcgggatggcccggctcctgaacaactggagcgacgtgtccgtgggccaaatcgccccgttcatcatcgcggacatccacgaccagctcgacgcgggcgacaaggactacttccgccgcacgcgcgagaagaatatgggccgccccctcgaagaagtggtcgccggccgtgagcagcggctggaatccctgcacaaatggctgcatccgctgcgcatgaccctgcggacccagcgcttcatcggcggtgccaagcccaactacgccgactacatcgtcttcggcccgttccaatgggcccgcgtgaccagcccgttcgaactgctgaagcccgacgacctcatccatgcgtggcgggaacgcatgctcgacctgttcgatgggatggcccgcaaggccccggtggtcgaggcggcc

SEQ ID NO: 141 - protein, 230 aa, Artificial Sequence
  Description of Artificial Sequence: Synthetic polypeptide
MTILHYELCGADSAQVFSPHCWKSRMALEHKGLDYKTVAVPFTQVATLEGGDARRVPVIRDGDTVVEDSLAIAEYLDANYPDTPSVLGGPEAAALTRFVGNWSQRNLHPAVSKLAMLDIHDALADTDKAFFRRTRENTLGSTLEEFSAKFPKDGAELGRALEPFATTLQGQPYLGGKTPLFADYIVFGALQWLRVTSPLDVLDKTSPVGEWFERLLDMYDGVGRSVPKAA

SEQ ID NO: 142 - DNA, 690 bp, Artificial Sequence
  Description of Artificial Sequence: Synthetic polynucleotide
atgacgatcctgcactacgaactgtgcggcgccgacagcgcccaggtcttctccccgcactgttggaagtcccgtatggcgctggagcacaagggcctggactacaagacggtggccgtgccgttcacccaggtggccaccctggaaggcggcgatgcgcgccgtgtgccggtcatccgggacggcgataccgtggtggaagacagcctggcgatcgcggaatatctggacgccaattacccggacaccccgtccgtcctgggcggtcccgaagccgccgcgctgacccgtttcgtggggaattggagccagcgcaacctgcacccggcggtgagcaagctggcgatgctggacatccatgacgcgctcgcggacaccgataaggccttcttccgccgcacgcgcgaaaacaccctgggcagcacgctggaggagttctcggccaaattcccgaaggacggggcggaactgggtcgcgccctggaaccgttcgccaccacgctgcaaggccaaccctacctgggcggcaagaccccgctgttcgccgactacatcgtcttcggcgccctccagtggctgcgtgtgacctcgcccctggacgtcctcgataagacctccccggtcggcgaatggttcgagcgcctcctggacatgtatgatggggtgggccgttccgtcccgaaggcggcc

SEQ ID NO: 143 - protein, 233 aa, Artificial Sequence
  Description of Artificial Sequence: Synthetic polypeptide
MSITLYDLAAADTNVRFGPHCWKSRLALSHKQLKHETVPVAFTEKNKIAISGQGLLPVLTDGDTVVSDSWDIALYLESHYSQGPLLFENEDAKFHAMSVNEWCNNVLSVHIRPLVIMPIFRIVREEDKSYFRQSREEKLGLSLEAYNDKARGSIVELNKTLDTLREVLDDQSYLTGQSPSYADICVLGMFLWIACSNEVALIDIGFTDEEDIFYQWYQRMLNHYRDVIPSRLL

SEQ ID NO: 144 - DNA, 699 bp, Artificial Sequence
  Description of Artificial Sequence: Synthetic polynucleotide
atgagcatcaccctgtatgacctggccgccgccgacacgaatgtgcgcttcggtccccactgttggaagtcccgcctcgccctgagccataagcagctgaaacacgagaccgtcccggtcgccttcaccgaaaagaacaaaatcgccatctccggccaaggcctgctcccggtcctcacggatggggataccgtcgtcagcgactcgtgggacatcgccctctacctggagagccattactcgcagggcccgctgctgttcgaaaacgaagacgccaagttccacgcgatgagcgtcaacgaatggtgcaacaacgtcctgagcgtgcacatccgcccgctggtcatcatgccgatcttccgtatcgtgcgcgaagaagacaagtcgtacttccgccaaagccgggaagagaaactgggcctctccctggaggcctacaacgacaaggcgcgcggtagcatcgtcgagctcaataaaaccctggacaccctgcgcgaggtgctggacgaccaatcgtacctgaccggtcagagcccgagctatgccgacatctgcgtgctcggtatgttcctgtggatcgcgtgcagcaacgaggtggccctcatcgacatcggtttcaccgacgaggaggacatcttctaccagtggtaccaacgcatgctgaaccattaccgcgatgtcatcccgtcccggctcctg

SEQ ID NO: 145 - protein, 231 aa, Artificial Sequence
  Description of Artificial Sequence: Synthetic polypeptide
MTNSRTLYSLCGSDISRPFSPHCWKTVLSLAHKGLDFEERPLPFTVIPTVEDGFSKTVPILRDGDQLVSDSFEIALYLDDAYPERPSLFDGEGGKAMARFVESWSQTVLHPAITRIALLDIHNMLDEPDRRYFRDSRTKALGRPLEEVTANRETEIAAFPALLAPIRRMLSFQPFIGGTSPLFADYIVFGALQWARITSGADLFADSDPVRDWFEGCLDLYDARGRSVTAA

SEQ ID NO: 146 - DNA, 693 bp, Artificial Sequence
  Description of Artificial Sequence: Synthetic polynucleotide
atgaccaacagccgcaccctgtacagcctgtgtggtagcgacatctcgcgcccgttcagcccccactgctggaagaccgtcctcagcctcgcgcataagggcctcgacttcgaagagcgcccgctgccgttcaccgtgatccccacggtcgaagacggtttctccaagacggtgcccatcctccgtgacggggatcagctggtcagcgactcgttcgagatcgcgctgtatctcgacgacgcgtacccggaacggccctcgctcttcgatggcgaaggcggcaaggcgatggcccgcttcgtcgagagctggagccaaacggtcctccatcccgccatcacgcgcatcgccctgctcgacatccacaacatgctggacgagccggaccgccgctacttccgcgatagccgtacgaaagccctggggcggcccctggaagaagtcaccgccaatcgcgagacggaaatcgccgccttcccggcgctgctcgcgccgatccgtcgtatgctgtccttccagccgttcatcggcggcacctcgccgctgttcgcggactacatcgtcttcggggccctccaatgggcgcggatcacctcgggtgcggacctgttcgcggacagcgacccggtgcgcgactggttcgagggctgcctggacctgtatgatgcccggggccgctcggtcaccgccgcg

SEQ ID NO: 147 - protein, 233 aa, Artificial Sequence
  Description of Artificial Sequence: Synthetic polypeptide
MAVARKLFELCGTETERVFSPYCWRTRMALAHKEIKAETIPWRFTEKEAIAPHQSDKVPVLLDGETAVADSWTIANYLEDTYPDRPSLFGGEGGRAMGRMLNWWGDTVVLGGIFPMIAADIHGLLRPVDQDYFRKTREARLGKTLEDAAANRDQAVEGFRNALNPMRLTLKTQPFIGGASPNYADYIVFGPFQWARATSAFKLLKEDDPVYAWREKLLDAFGGMARKSPGYAV

SEQ ID NO: 148 - DNA, 699 bp, Artificial Sequence
  Description of Artificial Sequence: Synthetic polynucleotide
atggcggtggcccgtaagctgttcgagctctgcggcaccgagaccgagcgcgtcttcagcccgtattgttggcgtacccgcatggccctcgcgcacaaggagatcaaggcggagacgatcccctggcggttcaccgagaaggaagccatcgcgccgcaccagtccgacaaggtccccgtgctgctcgacggcgaaaccgcggtggcggattcgtggaccatcgccaactacctggaggacacctacccggaccgcccgtcgctgttcggcggcgaaggcggtcgtgcgatgggtcgcatgctcaactggtggggtgacaccgtcgtcctgggtggtatcttcccgatgatcgcggcggacatccacggtctcctgcgcccggtcgaccaagactacttccgcaagacccgcgaagcccgtctgggtaagaccctcgaagacgcggcggccaaccgcgaccaagcggtcgaaggcttccgtaacgccctgaatccgatgcgcctgaccctgaaaacccaacccttcatcgggggcgcctcgccgaactatgccgactatatcgtcttcggccccttccagtgggcccgcgccacctcggcgttcaagctcctgaaggaggacgacccggtgtacgcctggcgcgaaaagctcctggacgccttcggcggcatggcccgcaaaagcccgggctatgcggtg

SEQ ID NO: 149 - protein, 232 aa, Artificial Sequence
  Description of Artificial Sequence: Synthetic polypeptide
MREPLKLYDLAGADERVRFSPNCWRTRFALAHKGLPCETVVWRFMEKDAIAFSGQGKVPVLVDGTRHVHDSWTIALYLEDTYPDRPSLFGGAAGRGLARFVNQWTSEVLHPAIAKVVLPDLVDILHEGDRDYYRSTREAAFGTTVGALRAAREDNVNALRTTLRPLRSTLADQKFLAGDAPNYADHVAFSAFLWAHASSPVKILAADDTLHAWCGRMFDAYDGLARLLPVAA

SEQ ID NO: 150 - DNA, 696 bp, Artificial Sequence
  Description of Artificial Sequence: Synthetic polynucleotide
atgcgggagcccctcaaactgtacgacctcgcgggcgcggatgaacgggtccggttctcccccaattgctggcggacccgtttcgcgctggcccacaagggcctcccgtgtgagaccgtggtgtggcgcttcatggaaaaggacgcgatcgccttctcgggtcaggggaaggtgccggtgctggtggacggtacccgtcacgtccacgacagctggaccatcgccctgtacctggaggacacctacccggaccggccgtccctgttcggtggtgcggccggtcgcggtctggcccgtttcgtcaatcaatggaccagcgaggtgctgcacccggccatcgccaaggtggtcctccccgacctcgtggacatcctgcacgaaggcgaccgggattactaccggtccacgcgggaagccgccttcggcacgaccgtcggcgccctgcgggcggcccgtgaagacaatgtgaacgcgctgcgtaccaccctccgcccgctgcgttcgaccctcgcggaccagaaattcctcgccggtgatgcccccaactatgcggaccacgtggccttcagcgccttcctgtgggcgcacgcgagcagcccggtcaagatcctcgcggccgatgacacgctgcatgcctggtgcggtcgcatgttcgacgcgtacgacggcctcgcccgcctgctgccggtcgccgcc

SEQ ID NO: 151 - protein, 234 aa, Artificial Sequence
  Description of Artificial Sequence: Synthetic polypeptide
MSADLRLFDLAGADDDLRFSPNCWRTRLALAHKELPVETIAWRFTEKNAIAKSDQGKVPVLVAGDKWLYESWDIAEYLEDTYPDRSSLFGCPQGRATARFVNQWASEVLHPAVARVVVPDIPAVLHEKDKDYFRTTREAAFGRTFEVIAAERGDALAVLNRTLAPLRSTVSKQPFVAGAAPAYADHAVFGAFQWARVISSAALLEDNDPVSSWVERMLDAYDGLARSAKRMASA

SEQ ID NO: 152 - DNA, 702 bp, Artificial Sequence
  Description of Artificial Sequence: Synthetic polynucleotide
atgagcgcggacctgcggctgttcgacctggccggcgcggacgacgacctgcgcttctcgccgaactgttggcggacgcgtctggccctcgcgcacaaggaactcccggtcgagaccatcgcctggcgcttcaccgagaagaatgccatcgccaaaagcgaccaggggaaggtgcccgtcctcgtcgccggggacaagtggctctatgagtcgtgggacatcgccgagtatctggaggacacctacccggaccggagctcgctgttcggctgcccccagggtcgtgcgaccgcgcgtttcgtgaaccaatgggcgtccgaggtcctgcatccggccgtggcgcgggtggtggtcccggacatcccggccgtcctccacgagaaggataaggactacttccgcaccacgcgcgaagcggccttcggtcgtaccttcgaagtcatcgccgcggaacgcggcgacgcgctcgcggtgctcaaccgcaccctcgccccgctgcgttcgacggtgagcaagcagcccttcgtggccggtgcggcgcccgcgtacgccgatcacgccgtcttcggcgcgttccaatgggcgcgcgtgatctcctccgccgccctgctggaggacaacgatccggtcagcagctgggtcgaacgcatgctggatgcctacgacgggctggcgcgcagcgccaagcgcatggccagcgcc

SEQ ID NO: 153 - protein, 230 aa, Artificial Sequence
  Description of Artificial Sequence: Synthetic polypeptide
MAIILYDLCGRDERLRFSPYCWRVRMALAHKGLEYTTVPWRFRDKEALAFANYDKVPVLTDGDTVVTDSFDIMRYLDKAYSANPVLGEGVSYQRVQFFKLYVERSVTPALFRTVALDLLAAIHPDDRAYFRETREARFGMRLEEVNNPEQGRAQLKQLLAPVRDQLRISPFLDGEAPSGADYLLFGSMMWAYTVSLERLVDANDPVDEWFKRMLEVHDAVAGKAVTIRDL

SEQ ID NO: 154 - DNA, 690 bp, Artificial Sequence
  Description of Artificial Sequence: Synthetic polynucleotide
atggccatcatcctgtatgacctctgtgggcgtgatgagcgcctccgcttctcgccgtattgttggcgcgtgcgcatggccctggcgcacaaggggctggaatataccaccgtgccctggcgcttccgtgacaaggaggcgctggccttcgcgaattacgacaaagtccccgtgctgaccgacggcgacacggtcgtgaccgactcgttcgacatcatgcgctacctcgacaaggcctacagcgccaacccggtgctgggcgagggcgtgagctaccagcgcgtgcagttcttcaagctgtacgtcgagcgttcggtgaccccggccctcttccgcaccgtcgccctcgacctgctggccgccatccatccggacgaccgggcgtatttccgcgagacgcgcgaagcccggttcggcatgcgtctggaggaggtgaacaatcccgaacagggccgggcgcaactgaaacaactcctggcgcccgtccgggaccaactccggatctcgcccttcctggatggcgaggccccgtcgggtgcggactacctgctgttcggcagcatgatgtgggcctacaccgtcagcctggaacgtctggtcgacgccaacgacccggtggacgagtggttcaagcgcatgctcgaagtgcacgacgcggtcgccgggaaggcggtcacgatccgggatctc

SEQ ID NO: 155 - protein, 247 aa, Artificial Sequence
  Description of Artificial Sequence: Synthetic polypeptide
MAQPIILYDVPSSLPGKAWSPNMHKARWALSYKGVPFETVWIEYSDIQTRMKSIGAQPTTKTKDGNDLYTLPVIQDPSTGAIVSDSFIIAEYLDKTYPSLPTLFPSSSKALIYVLDKTFTANGFPLVNMMLLKVVPHLLSPTKEYFVSRREYDLGLKMEEWSPVGPKREEHWDHLKQSLDVVEGWYARTPGPWIMGDTFSHADIIIGARLEWYYTILDEDERKKLTSWHEGRWAKLLTEVGKVCNVL

SEQ ID NO: 156 - DNA, 741 bp, Artificial Sequence
  Description of Artificial Sequence: Synthetic polynucleotide
atggcccaaccgatcatcctgtacgacgtcccgtcgagcctcccgggtaaggcctggagcccgaacatgcacaaggcccgctgggccctgtcgtacaaaggggtgcccttcgagaccgtctggatcgagtacagcgatatccagacccgcatgaagagcatcggtgcccagccgaccaccaagaccaaggacgggaacgatctgtacaccctcccggtcatccaagacccgtccaccggggccatcgtgtcggacagcttcatcatcgcggagtatctggacaagacctacccgtcgctgcccaccctgttcccgagctcctcgaaggccctgatctacgtgctggacaagaccttcacggccaatggcttccccctggtgaacatgatgctcctgaaggtcgtcccccatctgctgtcccccaccaaggagtacttcgtcagccgtcgcgaatacgatctgggcctgaagatggaagaatggagcccggtcggccccaaacgcgaagagcactgggaccacctgaagcaatcgctcgacgtggtggaaggctggtacgcccgtacgccgggcccctggatcatgggcgacaccttcagccatgcggacatcatcatcggcgcccgtctggagtggtactacaccatcctggacgaggacgagcgtaagaagctcacctcctggcacgagggccggtgggccaagctgctgaccgaagtcggcaaggtgtgtaatgtcctc

SEQ ID NO: 157 - protein, 254 aa, Artificial Sequence
  Description of Artificial Sequence: Synthetic polypeptide
MTVTKITFFDIPTVLPVPTSPNTWKVRLALNYKGLCYQTRWVETTDIESVSKSLGIPPTGTSPSGVPTYTLPALIDNTFSPPAILSDSTPIIEYLERRYPDPDPTHVLLPSGSRALQALFEYHVATSITAHLLPVMVMHMYSKKTPRDRAHFRQRMEAAFGKKLEDIELKGRDREEAWKRIEGSFDLLSKLLEKNVHGIYFMGENLSLADCMLGGLMLTLRYDSPDEAWLKVVSWNNGRWARYMAALEKWAVVH

SEQ ID NO: 158 - DNA, 762 bp, Artificial Sequence
  Description of Artificial Sequence: Synthetic polynucleotide
atgaccgtgacgaaaatcaccttcttcgatatcccgaccgtgctgcccgtcccgaccagcccgaatacctggaaagtccgcctggcgctgaactataagggcctgtgctaccaaacccgctgggtcgagaccaccgacatcgagagcgtcagcaagagcctcggtatcccgccgaccggcaccagccccagcggtgtgcccacctacaccctgccggcgctgatcgataacacgttcagcccgccggcgatcctgagcgatagcacgcccatcatcgaatacctggaacgtcgctaccccgatccggacccgacccatgtcctgctcccgagcggttcgcgtgccctccaggccctgttcgagtaccacgtcgccacctcgatcaccgcgcatctcctgccggtcatggtgatgcacatgtattcgaagaagaccccgcgcgaccgggcgcacttccggcaacggatggaggcggcgttcgggaagaagctggaggatatcgagctcaagggtcgcgaccgggaggaggcgtggaagcgcatcgagggcagcttcgacctgctctccaagctgctggagaagaatgtccacgggatctacttcatgggcgagaacctgagcctggccgattgtatgctgggtggcctgatgctcaccctccggtatgattccccggacgaggcgtggctgaaggtggtgtcgtggaacaatggtcggtgggcgcgctatatggccgccctggagaagtgggccgtcgtgcat

SEQ ID NO: 159 - protein, 247 aa, Artificial Sequence
  Description of Artificial Sequence: Synthetic polypeptide
MSQPIILYDIPARVPGITFSGNPIKARYTLAYKGLAFKTVWIEAQDIEERMKAIGAKPTKRKPDGSDCYTLPTIEDPSTGAVVSDSFAIAEYLEETYPSKPTVFPHNTRALISIFDSTFMNTISPVFAVFYAVVAPKVHPQNGEFIKKQVEVNFGTKWEDLSPIGPKREADWQNIKAGLGVIDGWYSKSGGKWIMGDTFSYADMIVGAWMRCFSVSLDKEQWEEMKSWNGGRWGDIVEEIDAYPILN

SEQ ID NO: 160 - DNA, 741 bp, Artificial Sequence
  Description of Artificial Sequence: Synthetic polynucleotide
atgagccagccgatcatcctgtatgacatcccggcccgggtccccgggatcaccttctcgggcaatccgatcaaggcccgctacaccctcgcgtacaagggcctggcgttcaagacggtctggatcgaggcccaggacatcgaagaacgcatgaaggcgatcggcgcgaagcccaccaagcgcaaaccggacggttccgactgctatacgctcccgaccatcgaagatcccagcaccggcgccgtcgtgtcggacagcttcgccatcgccgagtacctggaggagacctacccgtcgaagccgaccgtcttcccccataatacccgtgccctcatctcgatcttcgacagcaccttcatgaacaccatcagccccgtcttcgcggtcttctatgccgtcgtggccccgaaggtgcacccgcagaacggcgagttcatcaagaagcaggtggaggtcaacttcggcaccaaatgggaagacctgagccccatcggcccgaagcgtgaggccgactggcagaatatcaaggcgggcctgggcgtcatcgacggttggtactcgaagtcgggcggcaagtggatcatgggcgacaccttcagctacgccgacatgatcgtcggcgcgtggatgcggtgtttctcggtcagcctggataaggagcagtgggaggagatgaagtcctggaacggcggccgttggggcgatatcgtggaggaaatcgacgcgtaccccatcctgaat

SEQ ID NO: 161 - protein, 247 aa, Artificial Sequence
  Description of Artificial Sequence: Synthetic polypeptide
MSQPIILYDIPGKGPVKAFSGNVFKARYTLAYKGLAFKSVWIESQDIEERMKAIGAKPTGRKPDGSDFYTVPVIQDPSTGAIVSDSSAIAEYLDETYPSTPTVFPRGSKALISVFDSAFMQSMGPMVPLIVVKNYTKILPTNEEYFRKSVEMRVGSKLEDISPEGPKREQHWKNAKDFLGVVDAWYSKSEGKWIMGDTFSYADIIVGAVMRCFNGLFEGEEWEEMSSWHGGRWGRLLEEVNKYSILA

SEQ ID NO: 162 - DNA, 741 bp, Artificial Sequence
  Description of Artificial Sequence: Synthetic polynucleotide
atgagccagccgatcatcctctacgacatcccgggcaagggcccggtgaaggccttctcgggcaacgtcttcaaggcccgctatacgctggcctacaagggcctcgccttcaaatcggtgtggatcgagtcccaggacatcgaggagcgcatgaaggccatcggggcgaagcccacgggtcgcaagccggacggcagcgatttctataccgtcccggtcatccaagacccgtcgaccggcgccatcgtgagcgattcctccgcgatcgccgagtacctggacgagacctacccgtccaccccgaccgtcttcccccgtggttccaaggccctgatctcggtcttcgacagcgccttcatgcagtcgatgggcccgatggtgccgctgatcgtcgtcaagaactacacgaagatcctccccaccaacgaggagtatttccgcaaaagcgtggagatgcgcgtgggctcgaagctggaagacatctccccggaggggccgaagcgtgaacagcattggaagaatgcgaaggatttcctgggggtcgtggacgcctggtacagcaagtcggaaggcaagtggatcatgggcgacacgttctcctacgcggacatcatcgtcggcgcggtcatgcgctgtttcaacggcctgttcgaaggcgaggaatgggaagaaatgagctcgtggcatggtggccgttggggccgcctgctggaggaagtcaataagtacagcatcctggcc

SEQ ID NO: 163 - protein, 247 aa, Artificial Sequence
  Description of Artificial Sequence: Synthetic polypeptide
MSQPIVLYDIPTQAPGKALSGNVLKARYTLAYKGLAFKSIWVEAQDIEERMKAIGAKPTGHKPDGSGFYTVPTIQDPSTGAVVSDSFAIAEYLEETYPSKPTVFPSNAKALISVFESAFINATGPIFPTLVILVGSKFYPKNEEYFRKQAEERFGTKWEDISPVGRKREEGWKNTKAALGVIDGWYSKSGGKWIMGDTFSYADIIVGAWMRSFSVVFDKDQWEELKSWHGGRWSGIVEEINKYAILD

SEQ ID NO: 164 - DNA, 741 bp, Artificial Sequence
  Description of Artificial Sequence: Synthetic polynucleotide
atgtcgcagccgatcgtgctgtatgacatccccacccaggccccgggcaaagccctgtccggcaacgtcctgaaggcccgctacaccctggcctacaaaggcctggccttcaagtccatctgggtggaagcccaggacatcgaggaacgcatgaaagcgatcggggccaagccgaccggccacaagcccgacggcagcggcttctataccgtgcccaccatccaagatcccagcacgggcgccgtggtgagcgattcgttcgccatcgccgagtacctggaggagacctacccgtcgaagcccacggtcttcccgtccaacgccaaggccctcatcagcgtcttcgagagcgcgttcatcaacgccacgggccccatcttcccgacgctcgtcatcctcgtgggttcgaagttctacccgaagaacgaggagtacttccgcaagcaggcggaggagcggttcggcaccaagtgggaggacatcagcccggtcgggcggaagcgtgaggaagggtggaagaacacgaaagcggccctcggtgtcatcgacggctggtattcgaagtccggcggcaagtggatcatgggcgacaccttctcctacgccgatatcatcgtgggcgcgtggatgcgcagcttcagcgtggtgttcgataaggaccagtgggaggagctgaagagctggcatggcggccggtggtcgggtatcgtcgaggagatcaacaagtacgccatcctcgat

SEQ ID NO: 165 - protein, 241 aa, Artificial Sequence
  Description of Artificial Sequence: Synthetic polypeptide
MSQSKPEIILYDLACTKNICFSPVVWRIRLMLNYKRIPYQTVFLEFPDIEPTLKELGIPPSDSGTYTVPAIHHLPTNTHIMDSARIADFLESTYPDPAVPLTSELGREIEAQSRKVVSTAFGASVLPREMGILSPRAQEYFRRTREAALGHPLEDLLDPEREEQAWAAVDGAIREVGELMLTHQAEGPFILGARPSYTDFFIAGALQSAQTVHEGVFERLVKYPGYREVYEACVPFMQRKN

SEQ ID NO: 166 - DNA, 723 bp, Artificial Sequence
  Description of Artificial Sequence: Synthetic polynucleotide
atgagccagtccaagcccgagatcatcctctacgacctcgcctgcaccaagaatatctgcttcagcccggtcgtgtggcgcatccgcctgatgctgaactacaagcgtatcccgtatcagacggtcttcctggagttccccgacatcgagcccaccctgaaggagctgggtatcccgccctcggatagcggcacctatacggtgccggccatccaccatctgccgaccaatacccacatcatggattccgcgcgcatcgccgatttcctcgaatcgacgtatcccgacccggcggtcccgctgaccagcgagctcggccgggaaatcgaggcccagtcgcgtaaggtggtgagcaccgcgttcggtgccagcgtgctgccgcgggaaatgggcatcctcagcccccgcgcgcaagaatatttccgccgtacccgtgaggcggccctgggccatccgctggaggatctgctggaccccgaacgcgaggaacaagcctgggcggccgtcgatggcgccatccgcgaggtgggcgaactcatgctgacccaccaagccgaggggcccttcatcctgggcgcccgcccgtcctacaccgacttcttcatcgcgggcgcgctccagagcgcgcagaccgtccatgagggcgtcttcgagcggctggtcaagtacccgggctaccgcgaggtgtatgaggcgtgtgtcccgttcatgcagcgtaagaat

SEQ ID NO: 167 - protein, 242 aa, Artificial Sequence
  Description of Artificial Sequence: Synthetic polypeptide
MAEIILYDLACTKNVCFSPVVWRIRLMLNYKRIPYRTIFLEFPDIEPTLKGLGILPSESTSTSKPKYTVPAIQHVPTNTYIMDSASIAHFLESTYLDPPVPLTSELGREIEAKSRAVVGPIFFTSVMPREIGILSPRAQEYFRRTREASLGHRLEDLLDLDKEEQSWDAVEDDVRAVGELMQMNRADGPFLLGARPTYTDFFIAGSLQSARVVEESVFRRFFGYPGYREVYEACLPYMEKKD

SEQ ID NO: 168 - DNA, 726 bp, Artificial Sequence
  Description of Artificial Sequence: Synthetic polynucleotide
atggccgagatcatcctgtacgacctcgcgtgcacgaagaacgtgtgtttcagccccgtggtctggcgcatccgcctgatgctcaactataagcgcatcccgtaccgcaccatcttcctggagttccccgacatcgaaccgaccctcaagggcctgggcatcctgccgagcgagagcacctcgacctccaagcccaagtacaccgtcccggccatccagcacgtgccgacgaacacctacatcatggattcggcgtccatcgcccacttcctggagagcacctacctcgacccgccggtcccgctgacgagcgagctcggccgtgaaatcgaagcgaaatcccgcgcggtcgtgggtccgatcttcttcacgtcggtgatgccccgggagatcggcatcctcagcccccgcgcgcaagagtatttccgtcgtacccgtgaggccagcctgggccatcgcctggaggacctgctggacctggacaaggaagagcagtcgtgggacgccgtggaggacgacgtgcgcgcggtgggcgaactgatgcagatgaatcgtgccgacggcccgttcctgctcggcgcccgccccacgtacacggatttcttcatcgccggctcgctgcaaagcgcccgtgtcgtggaggaatccgtcttccgccgcttcttcggctacccgggttaccgcgaggtctacgaggcctgcctgccgtatatggagaagaaggat

SEQ ID NO: 169 - protein, 256 aa, Artificial Sequence
  Description of Artificial Sequence: Synthetic polypeptide
MITFYDIPSTTSLNSWSPNGWKTRYTLNFKGLPYKTEWVEYPDIAALYQKNNVPAPAKQSDGSPYYSLPLIHDSKTNTFVADSLEIAKYLDKTYPDTPKVLPDGEEGLAKTTQFLGELGGTMFPLFPIIFQATVPILNEVSKDHFKVARAKNLVSVFNNIKSIDEIQLSEKEVEERWEQVRAGFQGLDSKFGGEGKELAWFAGDKITFADFALAGMLLWIKLVWGEESAEWKRVSGWNNGKWATMLKKLEAYHTVA

SEQ ID NO: 170 - DNA, 768 bp, Artificial Sequence
  Description of Artificial Sequence: Synthetic polynucleotide
atgatcaccttctatgacatcccctccaccacctcgctgaacagctggtccccgaatgggtggaaaacccgttacaccctcaacttcaagggcctcccgtacaagaccgagtgggtggaatatcccgacatcgcggccctctaccaaaagaacaacgtgccggcgcccgccaaacagtcggacggcagcccctattactccctcccgctgatccatgacagcaagaccaacaccttcgtcgcggactcgctggagatcgccaagtacctggacaaaacgtacccggacacgcccaaagtcctccccgacggtgaggaggggctggccaagaccacccagttcctgggtgagctcggcggcaccatgttcccgctgttcccgatcatcttccaggccaccgtgcccatcctgaacgaagtgtccaaggaccatttcaaggtcgcgcgcgccaagaacctcgtcagcgtgttcaacaacatcaagtccatcgacgagatccagctgtcggagaaggaggtggaagaacgttgggagcaagtccgtgcgggcttccagggcctggattcgaaattcggcggtgagggcaaggaactggcctggttcgccggcgacaagatcaccttcgcggatttcgcgctggccggtatgctgctgtggatcaaactcgtgtggggcgaggaatccgccgagtggaaacgggtctcgggctggaacaacggcaagtgggcgacgatgctgaagaagctggaggcgtatcacaccgtcgcc

SEQ ID NO: 171 - protein, 248 aa, Artificial Sequence
  Description of Artificial Sequence: Synthetic polypeptide
MLIFYDITSEIPGRAWSPNTWKTRFCLNYKGIPYRTEWVEYPDIEPLCIERGIPPTSYWADGKPHYTLPAIHDPSTGTYIADSLLIAEYLDKTYPDTPRIFPRGLEALQLGFVKSFMTQLDSIWTSIIPQIANHLSPRSLEYFRRTREKSFHKQLEDIAPVGQAQSEAWDLFKRGLDVVNGWLEKNSASGPFVMADTVSWADFAVGGYLIWMKIVWGEDSQQWKDISSWGEGRWGALIEGLEKYSEIK

SEQ ID NO: 172 - DNA, 744 bp, Artificial Sequence
  Description of Artificial Sequence: Synthetic polynucleotide
atgctgatcttctatgacatcacctcggagatccccggtcgcgcctggtccccgaacacctggaagacccgtttctgtctcaactacaagggcatcccctaccgcaccgaatgggtcgaatacccggacatcgagccgctctgtatcgaacgcggcatcccgcccaccagctactgggcggacgggaagccccattatacgctgccggccatccacgatccgagcaccgggacctacatcgcggacagcctcctcatcgcggagtacctggacaaaacctacccggataccccgcgtatcttcccccgcggcctggaggccctccaactggggttcgtcaagtcgttcatgacccagctggacagcatctggacgtccatcatcccccagatcgccaaccatctgtccccgcggagcctggaatacttccgccgcacccgcgagaagagcttccacaagcagctggaggatatcgccccggtgggccaggcccaaagcgaagcgtgggatctgttcaagcgcggcctcgatgtggtcaacggctggctggagaagaacagcgcctccggtccgttcgtcatggcggacaccgtcagctgggccgacttcgcggtcggtggctacctgatctggatgaagatcgtctggggcgaagactcgcagcagtggaaggacatcagcagctggggcgagggccgctggggcgcgctcatcgaaggcctggaaaagtacagcgaaatcaaa

SEQ ID NO: 173 - protein, 247 aa, Artificial Sequence
  Description of Artificial Sequence: Synthetic polypeptide
MTTHSEPEIVLYDLACIKDACFSPTVWRIRLMLNYKRIPYKTIFLEFPDIEPTLKELGLTPGKTTTGSQSKYTVPAIKHVPTNRCIMDSLVIAQFLESIYSEPPVPLTSELGRQIQVKSRSILGKTLSDSIMPREIYILSPRAQEYFRRTREASIGRSLEDVLDPTKEEQDWLAIDPELRAIGELMRTNKDEGPFILGAKPTYADFFIAGTLQCARMVDEGVFQRFMKYPGYKGIYEGCRPYMERND

SEQ ID NO: 174 - DNA, 741 bp, Artificial Sequence
  Description of Artificial Sequence: Synthetic polynucleotide
atgacgacccattcggaacccgaaatcgtcctctatgacctggcgtgcatcaaggacgcgtgcttctccccgaccgtgtggcgcatccgcctcatgctcaattacaagcgcatcccgtacaagaccatcttcctggagttccccgacatcgagccgacgctgaaagagctcggcctgaccccggggaagaccaccaccggtagccaaagcaagtacacggtcccggccatcaagcatgtcccgaccaatcgctgtatcatggacagcctggtcatcgcgcagttcctggagtcgatctacagcgaaccgccggtgccgctgaccagcgaactgggccgccaaatccaggtcaagagccgttccatcctgggcaagaccctctccgactcgatcatgccccgcgagatctacatcctgagcccgcgtgcccaggaatacttccgccgtacgcgcgaagcctccatcgggcgtagcctggaggacgtgctggacccgaccaaagaagaacaagactggctggccatcgaccccgagctgcgcgccatcggggagctgatgcgtacgaataaggacgagggcccgttcatcctgggcgccaagccgacctatgccgatttcttcatcgcgggcaccctccagtgcgcgcggatggtggacgaaggcgtgttccagcgcttcatgaagtaccccgggtacaagggcatctacgaggggtgccggccgtacatggaacgcaatgat

SEQ ID NO: 175 - protein, 242 aa, Artificial Sequence
  Description of Artificial Sequence: Synthetic polypeptide
MAEIILYDLACTKNVCFSPVVWRIRLMLNYKRIPYRTIFLEFPDIEPTLKGLGILPSESTSTSKPKYTVPAIQHVPTNTYIMDSASIAHFLESTYPDPPVPLTSELGREIEAKSRAVVGPIFFTSVMPREIGILSPRAQEYFRRTREASLGHRLEDLLDLDKEEQSWDAVEDDVRAVGELMQMNRADGPFVLGDRPTYTDFFIAGSLQSARVVEESVFRRFFGYPGFREVYEACLPYMEKKD

SEQ ID NO: 176 - DNA, 726 bp, Artificial Sequence
  Description of Artificial Sequence: Synthetic polynucleotide
atggccgagatcatcctgtacgacctggcctgtaccaagaatgtctgcttcagccccgtcgtctggcgcatccgcctgatgctgaactacaagcgcatcccgtaccgcaccatcttcctggagttcccggacatcgagccgaccctgaagggcctgggcatcctgccgtcggagtcgaccagcacgagcaaacccaagtacaccgtgccggccatccagcatgtcccgaccaacacgtacatcatggactcggcgagcatcgcgcacttcctggaatccacctatccggacccgccggtcccgctcacctccgagctgggtcgcgaaatcgaggcgaagtcgcgggcggtcgtcggcccgatcttcttcacctcggtcatgccgcgtgagatcggcatcctcagcccccgcgcgcaagaatacttccgccgcacccgcgaagcctccctggggcatcgtctggaagatctgctcgatctggacaaggaagagcaatcctgggacgccgtggaagacgatgtgcgcgccgtgggtgagctcatgcagatgaatcgtgccgacgggcccttcgtgctgggggaccgcccgacgtataccgacttcttcatcgcgggcagcctgcaatcggcccgcgtcgtcgaagagtcggtgttccgccgcttcttcggctacccgggcttccgtgaagtgtatgaagcctgcctgccgtacatggagaagaaagat

SEQ ID NO: 177 - protein, 148 aa, Artificial Sequence
  Description of Artificial Sequence: Synthetic polypeptide
MANRNVIEFYDIPGSGGVVWSPSTWKIRYALNYKGLEYQTKWIEFPDIESTCKKLGVPPTKTRRDGSPWYTLPAIYDPSTGVALVDSLRIAEYLEKQYPDKPSLIPSGTLALHTAFNEAAEFLTRKWTMELGMPLDEFYPKPENQEAE

SEQ ID NO: 178 - DNA, 444 bp, Artificial Sequence
  Description of Artificial Sequence: Synthetic polynucleotide
atggccaaccgcaacgtcatcgagttctatgacatcccggggtccggcggcgtcgtctggtcgccgtccacctggaagatccgctacgcgctcaactacaaggggctggagtaccaaaccaagtggatcgagttcccggacatcgagtccacctgtaagaagctgggcgtcccgccgaccaaaacgcgtcgtgacggttcgccgtggtatacgctgccggcgatctatgaccccagcaccggggtggccctcgtcgacagcctccgcatcgcggagtacctcgaaaagcaatatccggacaagccgtcgctcatcccgagcggcacgctcgccctgcataccgccttcaatgaagccgccgagttcctgacgcggaagtggaccatggaactggggatgcccctggatgagttctacccgaagcccgagaatcaagaagcggag

SEQ ID NO: 179 - protein, 255 aa, Artificial Sequence
  Description of Artificial Sequence: Synthetic polypeptide
MPSSQVIVLYDFPSTFPGKACSPNVWKTRLCLNYKGLPHRTIWVEYPDIAKVCKEIGAEPTATYPDGSPYYSVPIIYDPSTKSIVSESARIARYLDKTYPDTPVLIPPGTDAFHAAFNDVFESLALLPMQPLVLPSASDVLHLESRAYFRKSMEAWLGKKLEEVYLVGQAREEQWKKLAEGYTKMAMWLQMDGRDKLFFGGDNICYADITVASFLGALRRSFGADSADWAAVKEWDGGRWARFIERFDKYEVVHE

SEQ ID NO: 180 - DNA, 765 bp, Artificial Sequence
  Description of Artificial Sequence: Synthetic polynucleotide
atgccgtcgtcgcaggtcatcgtcctgtacgacttccccagcacgttccccggcaaggcgtgcagccccaacgtgtggaagacccgtctctgcctgaattacaagggcctgccgcaccggaccatctgggtcgaataccccgacatcgcgaaggtgtgcaaggagatcggtgccgagccgaccgccacgtatccggatggcagcccgtactactcggtgccgatcatctacgacccctcgaccaaatcgatcgtgtccgagagcgcgcgcatcgcgcgctacctggacaagacctatccggatacgccggtcctgatcccgccgggcaccgatgccttccacgccgcgttcaatgacgtgttcgagagcctggccctgctccccatgcaacccctggtcctgccgagcgcgtccgacgtcctccatctggagagccgcgcctacttccggaagagcatggaagcgtggctgggcaagaagctggaggaagtgtacctggtcggccaagcccgcgaggaacagtggaagaagctggcggagggctacaccaagatggccatgtggctgcaaatggacgggcgggataagctcttcttcggcggtgacaacatctgctatgcggacatcacggtggccagcttcctgggcgcgctgcgtcgcagcttcggcgcggactccgcggattgggcggcggtcaaagaatgggatgggggccgctgggcccggttcatcgagcgcttcgataaatatgaggtcgtccacgaa

SEQ ID NO: 181 - protein, 255 aa, Artificial Sequence
  Description of Artificial Sequence: Synthetic polypeptide
MSSNHVIILYDIPSTLPGKACSPNTWKTRLSLNYKGLPHRTIWVEYPDIAKVCKEIGAEPTASYPDGSPYYSVPIIYDPSTKSVVSESARIARYLDKTYPDTPVLIPPETDAFHAAFNEVFESLALLPMQPLVLPSASEVLHPESRAYFRKSMEAWLGKKLEEIPLVGQAREEQWKKLAEGYTKMAMWLQMDGRDKLFFGGDNICYADITVASFLGALRRSFGADSAEWAAVKEWDGGRWARFMERLDKYEVVHE

SEQ ID NO: 182 - DNA, 765 bp, Artificial Sequence
  Description of Artificial Sequence: Synthetic polynucleotide
atgagcagcaaccacgtgatcatcctgtacgacatcccgtccaccctgcccggtaaggcctgtagccccaatacctggaagacccgcctgagcctcaactacaagggcctgccccaccgcaccatctgggtggaatacccggacatcgcgaaggtctgtaaggaaatcggggccgagcccacggcctcgtatcccgacgggtccccctactatagcgtgcccatcatctatgacccgagcacgaaatcggtcgtctccgagtcggcgcgcatcgcccggtatctcgacaaaacctaccccgatacccccgtgctcatcccgcccgaaacggatgcgttccacgcggcgttcaacgaagtgttcgaaagcctcgccctgctcccgatgcaacccctcgtcctcccgagcgcgtcggaggtgctgcacccggaaagccgggcgtacttccgcaagagcatggaggcctggctcgggaagaagctggaggagatcccgctggtcggccaggcgcgggaagaacagtggaagaagctggccgagggctataccaagatggccatgtggctccagatggacggtcgtgacaaactgttcttcggcggcgacaacatctgttacgcggatatcaccgtggcctccttcctcggtgcgctgcgtcgctcgttcggtgcggacagcgcggaatgggccgccgtgaaagagtgggatggtgggcggtgggcgcgcttcatggaacggctcgacaagtacgaggtcgtccacgag

SEQ ID NO: 183 - protein, 245 aa, Artificial Sequence
  Description of Artificial Sequence: Synthetic polypeptide
MASHVKPDIILYDLACTKSVSFSPVVWRIRLMLNYKNIPYKTIFLEFPDIEPTLKELGLVPGETSSGSKYTVPAIQHVPTNTYIMDSLPIAQFLESTYPDPPVPLTSELGREIETKARGVLGKAIYSSVMPREIRILSPRSQEYFRRTREASLGHRLEDLLDGDKENQVWDGVGEVLGAVGDLIRTHNADGPFVLGARPSCTDFFIAGSLQSTRVVDEGVFQKITKYPGYREVYEACLPYMEKKD

SEQ ID NO: 184 - DNA, 735 bp, Artificial Sequence
  Description of Artificial Sequence: Synthetic polynucleotide
atggcctcccatgtgaaaccggacatcatcctgtacgacctggcctgcaccaagagcgtctcgttcagcccggtcgtctggcgcatccggctgatgctgaactacaagaacatcccgtataagaccatcttcctggagttcccggacatcgagccgaccctcaaggaactcggcctggtgccgggcgaaacctcctcggggagcaagtacacggtcccggccatccagcacgtcccgaccaacacgtatatcatggacagcctcccgatcgcgcagttcctggagagcacctatccggacccgccggtgcccctgaccagcgagctgggccgtgaaatcgagaccaaggcgcggggtgtgctggggaaggccatctacagctcggtcatgccccgcgagatccgtatcctgagcccccgttcgcaagaatacttccgtcgcacccgcgaagcctcgctcggccaccgtctggaggacctgctggacggcgataaggagaaccaagtgtgggacggcgtgggggaagtgctgggcgccgtcggcgatctcatccgcacccacaatgccgacggcccgttcgtgctgggggcccggcccagctgtaccgacttcttcatcgccggcagcctccaaagcacgcgcgtcgtcgacgagggggtcttccagaaaatcaccaagtacccgggctaccgcgaagtgtacgaggcgtgcctgccgtacatggaaaagaaggat

SEQ ID NO: 185 - protein, 238 aa, Artificial Sequence
  Description of Artificial Sequence: Synthetic polypeptide
MTTKVGAWSVNTWRTRYALKYKGIPFTTTWLELCDVEREMIAAGAPPSGKWADGRPKYTVPTIYDSLTKEYITDCHEIARYLDKTYPDKPLLFPHNTSGLQHVFTDTMFQKVPFAFFPAILEHGFKIFNERTQAYFRETREKIFGKKLEEIWGDEAVVEKAKADGKEGLTWVEAMVKENGDNALFLLGDSPVDADFAIASVFQWIKKGYPALWEEVKGLNGGRWARFMEAMHQYEDEN

SEQ ID NO: 186 - DNA, 714 bp, Artificial Sequence
  Description of Artificial Sequence: Synthetic polynucleotide
atgaccacgaaagtgggcgcctggtccgtcaatacctggcggacccgctatgcgctgaaatacaaaggcatcccgttcacgaccacctggctggaactgtgtgacgtcgagcgcgagatgatcgccgccggcgccccgccctcgggtaaatgggccgacggccgccccaagtacacggtgccgaccatctacgactccctgacgaaggagtacatcaccgactgccacgagatcgcccgctacctggataagacctacccggacaagcccctgctgttcccgcacaacaccagcggcctgcagcacgtgttcaccgacaccatgttccagaaggtcccgttcgcgttcttccccgccatcctcgaacacggcttcaagatcttcaacgagcggacgcaggcctacttccgggagacgcgcgagaagatcttcggcaagaaactggaggagatctggggtgacgaagcggtcgtcgagaaggccaaggcggatgggaaggagggcctgacctgggtcgaagcgatggtgaaggagaacggcgataacgccctgttcctcctcggcgactccccggtggacgccgacttcgccatcgcctcggtgttccagtggatcaagaaggggtaccccgccctgtgggaggaggtcaagggcctgaacgggggccgctgggcgcgcttcatggaggcgatgcaccagtacgaagacgaaaac

SEQ ID NO: 187 - protein, 252 aa, Artificial Sequence
  Description of Artificial Sequence: Synthetic polypeptide
MAPIIFYSIPSQKGCWSLHTLKIRYALNYKGLPFRTEWVEYPDIEKKCKEIGAEPTETKEDGSPLYTLPVISDPSTGKVISDGPKIAKYLDEAYPDTPKLYPPGTEATQKEAMAQLFGKAAPALRPMVVPCVVHILGEGSKPYFRATREKALGCTLEEKIPKGEDRKLRLEQGREAFEAFLARFKDASGKETPFLLGEAPCFADFSVAGFLQWIRVTLGDESDVWKAVESWSDGRVVKYLEDLRKYEGDPRA

SEQ ID NO: 188 - DNA, 756 bp, Artificial Sequence
  Description of Artificial Sequence: Synthetic polynucleotide
atggcgccgatcatcttctacagtatcccctcccagaagggctgttggagcctgcataccctcaagatccgctacgcgctgaattacaaaggcctgcccttccggaccgagtgggtcgagtatccggacatcgagaagaagtgcaaggaaatcggcgccgaaccgaccgaaaccaaggaggatggtagccccctctacaccctgccggtcatctccgacccgagcacgggcaaggtcatctccgacggcccgaagatcgccaagtacttggatgaggcctaccccgacaccccgaagctgtacccgcccggcaccgaagccacccagaaggaggccatggcccaactcttcggtaaggcggccccggccctccgcccgatggtagtcccgtgcgtcgtccacatcctcggtgagggcagcaagccctacttccgcgccacccgggagaaggccctggggtgtaccctggaggagaagatcccgaagggcgaagaccgcaagctgcgcctggaacagggtcgggaggccttcgaagccttcctggcccggtttaaagatgcgtcggggaaggaaaccccgttcctgctcggcgaagccccctgctttgccgacttcagcgtcgccggattcctgcagtggattcgtgtgaccctgggcgatgagagcgacgtgtggaaggccgtcgaatcgtggtcggacggccgcgtcgtcaaatacctggaggacctccgcaagtacgagggcgacccgcgggcc

SEQ ID NO: 189 - protein, 220 aa, Artificial Sequence
  Description of Artificial Sequence: Synthetic polypeptide
MIKLYDLAAADDNQRFSPYCWRVRLALAHKGLPVEIIPWRLTEKSVIAFSNQGLVPVIVDGETVVNDSWKIAEYLEQKYPEPSLFGGSQAQALTLFIKHWNDGVLAPSLFPLVILDIYKNLDPKDKPYFRENREQRLGKTLEEFANPSDEQLSLFRANLEPVRKTLNTAAFIGGDQPNFADYIILATLQLGYTISPLKFLEPNDPVFAWREQILALYNNL

SEQ ID NO: 190 - DNA, 660 bp, Artificial Sequence
  Description of Artificial Sequence: Synthetic polynucleotide
atgatcaagctgtacgacctggcggcggccgacgataaccagcgcttctcgccctattgttggcgggtccgcctggccctcgcccataagggcctgccggtcgagatcatcccgtggcggctgacggaaaagtccgtgatcgccttctcgaaccagggcctggtgccggtcatcgtggatggcgaaaccgtggtcaacgactcgtggaagatcgccgaatacctggagcagaagtatccggagccgtccctcttcggtggctcccaagcccaggccctgacgctcttcatcaagcactggaacgacggcgtcctggcgcccagcctcttcccgctggtgatcctcgacatctacaagaacctcgaccccaaggacaagccgtacttccgcgagaaccgggaacagcgtctggggaagaccctggaggagttcgccaacccgagcgatgaacagctctccctgttccgcgccaacctggagccggtgcgtaagacgctgaacaccgcggccttcatcgggggtgaccagcccaacttcgccgactatatcatcctggcgacgctgcagctgggctacaccatcagccccctgaagttcctggagccgaacgaccccgtcttcgcgtggcgtgagcagatcctggccctgtacaacaatctg

SEQ ID NO: 191 - protein, 235 aa, Artificial Sequence
  Description of Artificial Sequence: Synthetic polypeptide
MTRVLYDLCGLDEALRFSPYCWRVRYALAHKGLDVETRPWRFTEKQALAFANHDKVPVLVDGETVVPESYEILRYLDRTYPEAPLLGDGVADARGRFFAHYAERSLAPAMLRIIIMDLLSAIHPDDRAYFRESREKRFGRSLEEFHSPVRGLSQLDTALEPLRGRLAEAPYLDGEAPGGADYIVFGNFMWARCVSSADLVSNADPVYAWLERMLDLYDGLGRQATRITDIEGAYR

SEQ ID NO: 192 - DNA, 705 bp, Artificial Sequence
  Description of Artificial Sequence: Synthetic polynucleotide
atgacccgcgtcctctatgacctctgcggcctcgacgaagccctccgtttctcgccgtactgttggcgcgtgcgttacgccctcgcgcataagggcctggacgtcgagacccgcccctggcggttcaccgagaagcaggccctcgccttcgccaatcatgacaaggtgcccgtgctggtggacggcgaaaccgtcgtgcccgagagctacgagatcctgcgctatctggaccgcacctatccggaagccccgctcctgggtgacggtgtcgccgacgcccgcggccgtttcttcgcccactatgccgaacgttccctggcgccggccatgctccggatcatcatcatggacctgctctcggccatccacccggatgaccgcgcctacttccgcgagagccgcgaaaagcggttcggtcgcagcctggaggagttccacagccccgtgcgcgggctgtcgcaactggataccgccctggaaccgctgcgcggtcgtctggccgaagccccctacctcgacggcgaagcccccggcggcgcggattacatcgtcttcgggaacttcatgtgggcgcgctgcgtgagctcggccgacctggtgtccaatgccgatccggtctacgcctggctggaacgcatgctggacctgtacgacggcctggggcggcaggcgacccgcatcacggacatcgagggcgcgtaccgc

SEQ ID NO: 193 - protein, 232 aa, Artificial Sequence
  Description of Artificial Sequence: Synthetic polypeptide
MTPELTLYDLAGADASLRFSPHCWKTHMALAHKGLSATTVPWRFTEKEAIDFSGQKLVPVLVNGTHVVSDSWQIACYLEDTFPERPSLFGGASGRALSLFANSWADTTLVPTLARLLLPSIHGLIHEKDRDYFRATREKRFGKLEDLPAGYEDQVAALRSALLPLRQMLGKQPYLAGEQPAYADYAVFGMFMWARCTSVLELLAGDDPVHAWRERLLDAYGGLARRAPTAQS

SEQ ID NO: 194 - DNA, 696 bp, Artificial Sequence
  Description of Artificial Sequence: Synthetic polynucleotide
atgacgccggagctgaccctgtacgatctggcgggcgccgatgcctccctgcggttctcgccgcactgttggaagacccacatggcgctggcccacaagggcctgtcggccaccaccgtgccgtggcgtttcacggagaaggaggccatcgacttcagcggccagaagctggtgcccgtgctggtgaacggcacccacgtcgtctccgactcctggcagatcgcctgttacctcgaagacaccttcccggaacggccgtcgctcttcggcggggcctcgggccgtgcgctgtccctgttcgccaacagctgggcggacaccaccctcgtccccaccctggcgcggctgctgctcccgtccatccacggcctcatccacgagaaagaccgcgactacttccgcgcgacccgcgagaagcgcttcggtaagctggaggatctcccggccggctacgaggatcaggtcgccgccctgcgctcggccctgctccccctgcgccagatgctcggcaaacagccgtacctggcgggcgaacagccggcgtatgcggactatgccgtgttcggcatgttcatgtgggcccggtgcacgtccgtcctggaactgctcgccggcgatgaccccgtccacgcgtggcgcgagcgcctgctcgatgcctacggtggtctggcccgtcgcgccccgacggcccaaagc

SEQ ID NO: 195 - protein, 231 aa, Artificial Sequence
  Description of Artificial Sequence: Synthetic polypeptide
MTLKLFELVGADAGRPFSPFVWRTRMALAHKGLSAETIPWRFTDKAAIAPYGSEKVPVLLDGDKAVADSWAIANYLEDAYPDRPSLFGGDGGRAMARMLNWWGDLAIVGGIFPLIVADIVDHLRPEDAAYFRASREARFNRSLEEVSAGRDKAVEGFRKSLDPLRLTLKTQAFIGGTAPNYADYIVFGGFQWARVVSDFQLLQNDDPVYAWRERLLDAFGGLARATPGYPV

SEQ ID NO: 196 - DNA, 693 bp, Artificial Sequence
  Description of Artificial Sequence: Synthetic polynucleotide
atgaccctcaagctgttcgagctggtgggtgcggacgccggccgcccgttctcgcccttcgtctggcgcacccggatggcgctggcgcataaggggctgagcgccgagaccatcccctggcgcttcaccgataaagccgcgatcgcgccgtatggtagcgagaaggtgccggtcctcctggacggcgacaaggccgtggccgattcgtgggccatcgcgaactacctggaagacgcgtatcccgaccgtccgtcgctgttcggcggcgatggcggtcgtgcgatggcccgtatgctgaactggtggggcgacctggcgatcgtcggcggcatcttccccctcatcgtcgccgacatcgtggaccacctccgccccgaggacgcggcctacttccgtgccagccgtgaggcccgcttcaaccgcagcctggaggaggtctccgcggggcgcgataaggcggtggagggtttccggaagtccctggaccccctgcgcctcacgctgaagacgcaagccttcatcggcggcaccgccccgaattacgccgactatatcgtgttcggcggtttccagtgggcgcgcgtcgtgagcgacttccagctgctgcagaacgatgatccggtctacgcctggcgtgagcgtctgctggacgccttcggtggcctcgcgcgtgcgacccccgggtatcccgtg

SEQ ID NO: 197 - protein, 230 aa, Artificial Sequence
  Description of Artificial Sequence: Synthetic polypeptide
MTILLYDLVGRDSTRPFSPHCWKVAMALAHKGLDISTVPTRFLEVPAVEGGVSKTVPVIRDGETVLADSFAIALYLDEAYPDRPTLFGGEGGEAMARFIERWSQVTIHPYVTTAAIMDLHAMQDAENAVYFRQSREQRLGKRLEEVTAAREAGLGTFRASLEPLRSMLFYQPFIGGAAPLFGDYIVFGALQWARIASPYQLLDDGDVVAQWFARCLDLHGGLGRKVAAAA

SEQ ID NO: 198 - DNA, 690 bp, Artificial Sequence
  Description of Artificial Sequence: Synthetic polynucleotide
atgaccatcctgctctatgacctggtcggccgcgattcgacccgccccttcagcccgcactgttggaaggtcgcgatggccctcgcccacaaaggcctcgacatcagcacggtgccgacccggttcctggaagtgccggccgtggagggcggcgtgagcaaaacggtgccggtcatccgcgacggcgagaccgtcctggccgattccttcgccatcgcgctctatctggacgaagcgtaccccgatcgcccgaccctcttcggcggcgagggcggtgaggccatggcgcgcttcatcgagcgctggtcgcaggtgaccatccacccctacgtcacgacggccgcgatcatggacctgcacgcgatgcaggacgccgagaacgcggtctacttccggcagtcccgcgagcagcgcctgggcaagcggctcgaagaggtcaccgcggcgcgtgaggccggtctgggcacgttccgggcctccctggagccgctccgctcgatgctgttctaccagcccttcatcggtggggccgccccgctgttcggcgactacatcgtcttcggcgcgctccaatgggcccggatcgcgtcgccctatcagctcctggacgatggcgacgtggtcgcccaatggttcgcgcgttgcctcgatctgcacggcgggctgggccggaaggtcgccgccgcggcg

SEQ ID NO: 199 - protein, 360 aa, Artificial Sequence
  Description of Artificial Sequence: Synthetic polypeptide
MEKIKLYGLRISYYTGKMEAYLRYKGIEHDFVTLNRARFRRIEEKTGTAQMPAIELPDGRFMADTTPMIAWFESQYPDTPVVPEDPVLAFLAHLLEDYFEEWLWRPAMHYRWSYQPSRLHLSRKIVDEFMTDMPVPKMIMRAVIRRRQLGRYVKKDGVSSDTWDHVESIYLKTLERLENVLSQREYLLGDKPSLADFGLFASMFRHFSQDPTASDIMRLQAPGVFEWQARLWNARWNSTSRWLDAVPGDLMPILKDVGAAYLPYLNDNARAWQQRQERFNPTTLGVQYRDVPVSQYRVWCLEELQRKARAVPQVDQDRLQTTLESANCWAPLFELKEPASGYDDSDLPFRAGKVHYDNRR

SEQ ID NO: 200 - DNA, 1080 bp, Artificial Sequence
  Description of Artificial Sequence: Synthetic polynucleotide
atggaaaagatcaagctgtacggcctgcgcatctcctactacacgggcaagatggaagcctacctgcgctacaagggcatcgagcacgacttcgtcaccctgaaccgcgcccggttccggcgcatcgaagaaaagaccggcacggcccagatgccggccatcgagctgccggacggtcgtttcatggcggacaccaccccgatgatcgcgtggttcgagtcgcaatacccggacacccccgtcgtgccggaggaccccgtcctggccttcctggcccacctgctcgaagactacttcgaggagtggctgtggcgcccggcgatgcactaccgctggtcgtaccaaccgtcgcgcctccacctgtcccgcaagatcgtggacgagttcatgaccgacatgccggtgccgaagatgatcatgcgcgccgtcatccgccgccgccagctgggccgctacgtcaagaaagacggcgtcagcagcgatacctgggatcatgtcgagtcgatctacctcaagaccctggagcgcctggagaatgtgctcagccagcgggagtatctgctgggggacaagcccagcctcgccgacttcggcctcttcgcgagcatgttccgccacttctcccaggacccgacggccagcgacatcatgcgcctgcaggccccgggtgtgttcgaatggcaggcccgcctgtggaacgcccggtggaacagcacctcccgttggctggacgcggtgcccggtgacctcatgcccatcctcaaagatgtcggcgccgcctacctgccgtatctcaacgacaacgcgcgggcgtggcagcagcgccaagagcgtttcaacccgaccaccctgggcgtccagtaccgtgacgtcccggtgagccaataccgcgtgtggtgcctggaggagctccagcggaaggcgcgcgcggtcccgcaggtcgaccaggaccggctgcaaacgaccctggaaagcgccaattgttgggccccgctgttcgagctcaaggaacccgcgtccggctacgacgacagcgatctgccgttccgcgccggcaaagtccactacgacaaccgccgc

SEQ ID NO: 201 - protein, 230 aa, Artificial Sequence
  Description of Artificial Sequence: Synthetic polypeptide
ELKCFDGFKSGRSDPSGIIGSPFVCRVKIALKLKGVEYKYVEENFRNKSEQLLKYNPVHKKVPVFVHGDKPLPESLVIVEYIDETWNNNPILASDPYQRALARFWSKFIDDKIVGASWKSVFTVDEKEREKNIAETYESLQFLENEIKEKKFFGGEELGLVDIAAVYVAFWIPLIQEIAGLELLTSEKFPNLYRWSQEFLNHPIVKESLPPRDPVFAFFKGRYEGLFSSK

SEQ ID NO: 202 - DNA, 690 bp, Artificial Sequence
  Description of Artificial Sequence: Synthetic polynucleotide
gagctcaagtgcttcgatggcttcaaatccggccggtcggaccctagcggcatcatcggaagcccgttcgtctgtcgggtcaagatcgccttgaagctgaagggtgtagagtacaagtacgtcgaggagaatttccgcaacaagagcgagcagctcctgaagtacaacccggtccacaagaaggtgccggtgttcgtccatggcgacaaaccgctgcctgaaagcctggtcatcgttgagtacatcgacgagacctggaacaacaatccaatcctggcaagcgacccctaccagcgcgctctcgcacgcttctggtccaagttcatcgatgacaagatcgtgggcgcgagttggaaatccgtgttcaccgtggacgaaaaggaacgggaaaagaacatcgccgagacgtacgagagcctgcagttcctggagaacgaaatcaaggaaaagaaattcttcggcggagaggaattgggtctggtagacatcgcggcggtgtacgtcgccttttggattccactcatccaggaaatcgctggcctggagctgctgaccagcgagaagttcccaaacctgtaccgttggtcccaagagttcctgaaccacccgattgtgaaggaaagcctgccgcctcgcgaccctgttttcgcgttcttcaagggccgctacgaaggcctgtttagttcgaag

SEQ ID NO: 203 - protein, 225 aa, Artificial Sequence
  Description of Artificial Sequence: Synthetic polypeptide
MAANQEDVKLLGATGSPFVCRVQIALKLKGVQYKFLEENLRNKSELLLKSNPVHKKVPVFIHNEKPIAESLVIVEYIDETWKNNPILPSDPYQRALARFWSKFIDDKVVGAAWKYIYTVDEKEREKNVEESYEALQFLENELKDKKFFGGEEIGLVDIAAVFIAFWIPIIQEVLGLKLFTSEKFPKLYKWSQEFINHPVVKQVLPPRDQLFAFYKACHESLSASK

SEQ ID NO: 204 - DNA, 675 bp, Artificial Sequence
  Description of Artificial Sequence: Synthetic polynucleotide
atggccgctaaccaggaggatgtcaagctgttgggcgccacgggttcgccattcgtatgccgtgtgcaaatcgcgctgaagctgaagggcgtgcagtacaagttcctggaggagaacctgcgcaacaagtcggagttgctgctcaaatcgaaccccgtgcataagaaggtgccggtgttcatccacaatgagaagcccatcgccgagtccctcgtgatcgtggagtatatcgacgagacttggaagaataacccgattctcccgagcgacccgtatcagcgagcactggcccgtttctggtcgaagttcatcgatgacaaggttgtcggcgcagcctggaagtacatctacaccgtggacgagaaggagcgtgagaagaatgtcgaagagtcctacgaagccctgcagttcctcgaaaacgagctgaaggataagaagttcttcggcggcgaagagatcgggctcgtggacatcgccgcggtcttcatcgcattctggattccgatcatccaggaggttctggggctcaagctcttcactagtgaaaagttcccgaagctgtacaagtggtcccaggagttcatcaatcacccggtcgtcaagcaggtgttgcctccgcgtgaccagctgttcgccttctataaggcgtgtcacgaaagtctgagcgcgtccaag

SEQ ID NO: 205 - protein, 225 aa, Artificial Sequence
  Description of Artificial Sequence: Synthetic polypeptide
MASSQEEVTLLGATGSPFVCRVKIALKLKGIEYKYVEENLANKSEQLLKYNPVHKKVPVFVHGDKPLAESLVIVEYIDETWNNNPILPSDPYQRALARFWSKFIDDNIVGSTWKSVFTADEKEREKNVAEASESLQFLENEIADKKFFGGEELGLVDIAAVYVAFWIPLVQEIAGLELLTSEKFPNLYKWSQEFVSHPIVKESLPPRDPVFGFFKGRYESLFASK

SEQ ID NO: 206 - DNA, 675 bp, Artificial Sequence
  Description of Artificial Sequence: Synthetic polynucleotide
atggcgagttcgcaagaggaggtgaccctgttgggagccaccgggagcccgttcgtctgccgcgtgaagatcgcgctgaagttgaagggtatcgaatacaagtatgtggaggaaaacctggcgaacaaatcggagcagctcctgaagtacaatccggtccacaagaaggtgcccgtcttcgtccatggtgataaacccctcgccgagagcctcgtgatcgtggagtacatcgacgagacctggaacaacaacccgatcttgccgagtgatccctatcagcgtgcgttggcgcgcttctggtccaagttcatcgacgacaacatcgtcggcagcacgtggaagtccgtctttacggccgacgagaaggagcgcgagaagaacgtggcggaagccagcgagtccctccagttcctggaaaacgagatcgccgacaaaaagttcttcggcggcgaagagctggggctggtcgacatcgcggcggtgtatgtggccttctggattccgctcgtacaagaaattgccggtttggagctgttgacctcggagaaattccccaacctgtacaagtggagccaggagtttgtctcccatcccatcgtgaaggagagcctcccgccgcgtgatccggtcttcggcttctttaagggccgctacgagtccctgtttgccagtaag

SEQ ID NO: 207 - protein, 206 aa, Artificial Sequence
  Description of Artificial Sequence: Synthetic polypeptide
MASSQEEVTLLGATGSPFVCRVHIALKLKGVEYKYVEENLRNKSELLLKSNPVHKKIPVFIHNGKSIAESLVIVEYIDETWKNNPILPSDPYQRALARFWSKFIDDKVFGASWKAVFTADEKEREKNVEEAIDALQFLENEIKDKKFFGGEEIGLVDIAAVYIAFWVPMVQEIAGLELFTSEKFPKLHNWSQEFLNHPIVKESLPP

SEQ ID NO: 208 - DNA, 618 bp, Artificial Sequence
  Description of Artificial Sequence: Synthetic polynucleotide
atggcgagtagccaagaagaggtcaccctgctgggcgcgaccggttcccccttcgtgtgtcgggtccatatcgccctgaagttgaagggcgtagaatacaagtatgtcgaagagaacctccgcaacaagagcgagctcctgttgaagagtaacccggtgcataagaagatccccgtcttcatccacaacggcaagagtatcgccgagtcgctcgtgatcgtagagtatatcgacgagacctggaagaacaaccccatcttgccgtccgacccgtatcagcgcgcgttggcgcgcttctggagcaagttcatcgatgacaaggtgttcggggccagttggaaggccgtcttcaccgcggacgaaaaggagcgggagaaaaacgtcgaagaggccattgacgccctgcagttcctggagaacgagatcaaggacaagaagttcttcggcggggaagagatcggtctggtggatattgcggcggtctacatcgcgttctgggtcccgatggtccaggagattgccggcctggagctgttcacctcggaaaagttcccgaagctgcacaactggtcccaagagttcctgaatcacccgatcgtcaaggaatcgctcccgccg

SEQ ID NO: 209 - protein, 248 aa, Artificial Sequence
  Description of Artificial Sequence: Synthetic polypeptide
MALKLYQFAISHYCEKIRWALDYKGLNYETVNLLPGQHVKTIRKLTGEASSVPVLDHDGHVVQGSAAILDYLDQTFPEHPLTPADPDVREQALAWERRLDEEAGPAIRCYSYHHFLQRPKIVVPMLAAGTPFYNRILLSLAFSRVDEVMRQWMKINEKTSEKSRQVMEELLTELAAIYTERPFLAGDQFSRADLTAAALFAPMFQPAQYPVPWPKTARIPKDIKHWLDQWQPQIRALEKVYEDNRRPG

SEQ ID NO: 210 - DNA, 744 bp, Artificial Sequence
  Description of Artificial Sequence: Synthetic polynucleotide
atggccctcaagctgtaccagttcgcgatctcccactattgcgaaaagatccgctgggccctggactacaagggcctgaattacgagaccgtgaacctgctgccgggccagcacgtgaagaccatccgtaagctgacgggcgaggccagctccgtccccgtcctggaccatgacggccatgtggtgcagggctccgcggccatcctcgactacctggaccagacgttcccggagcacccgctgacgcccgccgaccccgacgtgcgcgaacaagcgctggcgtgggaacggcggctggatgaggaggccggccccgcgatccgctgttacagctatcaccatttcctgcagcgcccgaagatcgtcgtcccgatgctggccgcgggtacccccttctacaaccgcatcctcctgtccctggcgttctcccgggtggacgaggtcatgcgccaatggatgaagatcaacgagaagacgtccgagaagtcccgccaggtcatggaggagctgctgaccgaactggccgccatctacacggagcgccccttcctcgccggcgaccagttcagccgtgcggacctgaccgccgccgccctcttcgcccccatgttccagccggcccagtatccggtgccgtggccgaagaccgcgcgcatcccgaaggacatcaagcactggctcgaccagtggcagccgcagatccgcgcgctcgaaaaggtgtacgaggataatcggcggccgggg

SEQ ID NO: 211 - protein, 228 aa, Artificial Sequence
  Description of Artificial Sequence: Synthetic polypeptide
MSNIILHQWEISPFCQKISRVLKFKGIPFDTVNYNGILGAKVPLLSKVGKVPVIDHNGQRIQDSTRIARYLDEAFPDTPRLYPEDPNQKALAELWEDWADESLYFYEVYLRVNDSEALEEAIRISSIGRPAYEKPMVKGFILAELKTQLFFQGLGRMKAENVEEEFIRHLDRIEQVLSQSEWLVGNSQTIADIAVVAQLGEVIRTSKKFSKEILNRPFIALWYKKQTG

SEQ ID NO: 212 - DNA, 684 bp, Artificial Sequence
  Description of Artificial Sequence: Synthetic polynucleotide
atgtccaacatcatcctgcatcagtgggagatcagccccttctgccagaagatctcgcgtgtcctgaagttcaagggcatcccgttcgacacggtcaactacaacggcatcctgggcgccaaagtgcccctgctgtccaaagtggggaaggtgccggtcatcgatcataacgggcaacgtatccaggacagcacgcgcatcgcccgctacctggatgaagccttcccggacacgccccgtctgtatccggaagatcccaatcagaaggccctcgccgagctgtgggaagactgggccgacgaaagcctgtacttctacgaggtgtacctgcgcgtgaacgactccgaagccctggaagaagcgatccgcatctcgtccatcggccgcccggcctatgaaaagccgatggtcaagggcttcatcctggccgaactgaagacccagctgttcttccaaggcctgggccgcatgaaggcggagaacgtcgaggaagagttcatccgccatctggaccgcatcgaacaggtcctgtcgcagtcggaatggctggtgggtaatagccagaccatcgcggacatcgccgtggtcgcccagctcggcgaagtcatccgtacgagcaagaagttctccaaagaaatcctcaaccggccgttcatcgccctgtggtacaagaagcagacgggc

SEQ ID NO: 213 - protein, 26 aa, Artificial Sequence
  Description of Artificial Sequence: Synthetic peptide
AGAGGQALNKGPQTTKMPPRVAEKAD

SEQ ID NO: 214 - DNA, 78 bp, Artificial Sequence
  Description of Artificial Sequence: Synthetic oligonucleotide
gccggtgccgggggtcaggccctcaacaagggcccccagacgaccaagatgcccccgcgtgtcgccgaaaaggccgat

SEQ ID NO: 215 - protein, 267 aa, Artificial Sequence
  Description of Artificial Sequence: Synthetic polypeptide
MKLEDLDQTKITLFDLYSEAPGHAFSPSTWKVRYALNFKKLPFVTDWVDFIQVQSLCAQIGAKPTIKKPDGGDIWTLPVIYDPSTKRVVSESLVIAEYLEQQYPSAPRLIPPGTEGLIRAFVHAFTKDVMPLYQFVIPLTIKVVKEESKPYFRATREAWFGTTLEEAVPKGEKRVEEWSKVKDVWKVFGRWFGDSDEDVEVGSEGTLRKWVMGDAPCFADFLVAAHLMWVTKVLGQESEEWKEISKWSGGRWGRLLEDCKVYEGDYL

SEQ ID NO: 216 - DNA, 801 bp, Artificial Sequence
  Description of Artificial Sequence: Synthetic polynucleotide
atgaagctggaggacctggatcagacgaagatcaccctgttcgacctgtatagcgaggcgccgggccatgcgttcagcccgtcgacctggaaggtgcgctacgccctgaacttcaagaagctcccgttcgtgaccgactgggtggacttcatccaggtgcagtcgctctgtgcgcagatcggcgcgaaaccgacgatcaagaagcccgacggcggcgacatctggacgctgcccgtgatctacgacccgagcaccaagcgggtggtcagcgaatcgctggtgatcgccgagtacctggagcagcagtatcccagcgcgccgcgtctgatcccgccgggcaccgaagggctcatccgcgccttcgtccacgccttcaccaaggacgtcatgccgctgtaccagttcgtgatccccctcaccatcaaggtcgtcaaggaggaatcgaagccctacttccgggcgacccgtgaagcctggttcggtaccaccctggaagaggccgtcccgaagggcgaaaagcgcgtggaagaatggtcgaaggtgaaggacgtctggaaggtcttcggccgctggttcggggactcggacgaagatgtggaggtcggctccgagggcacgctgcgtaagtgggtgatgggcgacgccccgtgcttcgcggatttcctggtggccgcgcacctcatgtgggtgaccaaagtgctgggtcaggaatccgaggagtggaaggaaatctcgaagtggtccggcggccggtggggccggctgctggaagactgtaaggtctacgagggggactatctg

SEQ ID NO: 217 - protein, 101 aa, Artificial Sequence
  Description of Artificial Sequence: Synthetic polypeptide
MGEVKLQGTWNSPYSWRVIWALKLKGIPYEYIEEDLRNKSPMLLQHNPVHKKIPVLVHDGKPICESMVILEYIEETWPQNPMLPNDPYEKAAARFWLRLSC

SEQ ID NO: 218 - DNA, 303 bp, Artificial Sequence
  Description of Artificial Sequence: Synthetic polynucleotide
atgggggaggtcaagctgcaaggcacgtggaactcgccctattcctggcgtgtcatctgggccctgaagctcaagggcatcccgtatgagtacatcgaggaggatctccgcaacaaatcccccatgctgctccaacataacccggtgcacaagaagatccccgtgctcgtccacgacggtaagcccatctgcgagagcatggtcatcctggagtacatcgaggagacctggccgcagaaccccatgctgccgaacgatccctatgagaaggcggcggcgcgtttctggctgcgcctcagctgc

SEQ ID NO: 219 - protein, 254 aa, Artificial Sequence
  Description of Artificial Sequence: Synthetic polypeptide
MKKSPPPNPIIFYDIPSDKVGCWSPNTWKIRYALNYKGLPFRTEWVEYPDIEAKCKEIGAEPTGTRDDKPLYTFPVIQDPNTGRVVSDGPKIARYLDDAYPDTPKLFPPGTEEKQDAVFAELIQKGGPALRPLVIPPVVNILNGVSKPYFRTTREKMFGGKLEELVPQGEDRKAALEHMREAFEAFAKRLDEGGPFILGDKPNFADFIVGGFLQWFRVTLGEDSDLWQAVSVWGNGRLLKYLEDLRPYEGNPRA

SEQ ID NO: 220 - DNA, 762 bp, Artificial Sequence
  Description of Artificial Sequence: Synthetic polynucleotide
atgaagaagtcgccgcccccgaaccccatcatcttctacgacatcccgagcgacaaggtgggttgctggagccccaacacctggaaaatccgctacgcgctgaactataagggcctgccgttccggaccgaatgggtggagtaccccgatatcgaagcgaagtgcaaggaaatcggcgccgaaccgacgggtacccgcgacgacaagccgctctacacgttccccgtcatccaggacccgaacaccggccgcgtggtgtcggatggtccgaagatcgcccgttatctggacgatgcctatccggataccccgaagctgttcccgcccggcacggaagaaaagcaagacgccgtcttcgcggaactcatccagaagggcggcccggccctgcgcccgctggtcatcccgccggtcgtcaacatcctgaatggtgtctcgaagccgtacttccggaccacccgcgagaagatgttcggcggcaaactcgaagagctggtcccccaaggcgaagaccggaaggccgccctggaacacatgcgcgaagccttcgaggccttcgccaagcgcctcgacgaaggtgggcccttcatcctgggggacaagccgaatttcgccgacttcatcgtcggcggcttcctgcagtggttccgcgtgaccctgggtgaggattccgatctctggcaagcggtgtcggtgtggggcaatggccgcctcctgaaatacctggaggacctgcgtccgtacgagggtaacccccgcgcc

SEQ ID NO: 221 - protein, 226 aa, Artificial Sequence
  Description of Artificial Sequence: Synthetic polypeptide
MGIKLYELRGKDPKYLWSSNPWKARMCLKLKGIEFESVPLTYPEIHAILPGILHKENGCTVPVLVDGENVIQDSFKIAQYLEEKYTGASIFQGNLALHEFIYNWIAEIKEPLFKLVILDIANKLDYESKEYYIKKNTALYGDLSTAALKDREVNVKRIQKNLNLLLDNLKQNTFLSGETIGWTDISLASFLYMIKLANESVLNEVIASTDQDLFNGWWNNMSKLMV

SEQ ID NO: 222 - DNA, 678 bp, Artificial Sequence
  Description of Artificial Sequence: Synthetic polynucleotide
atgggtatcaagctgtacgagctgcgtggcaaagacccgaagtacctgtggtccagcaatccctggaaagcgcggatgtgcctgaagctcaaaggcatcgagttcgagtccgtgcccctcacgtatccggagatccatgccatcctcccgggcatcctccataaagaaaacggctgtaccgtccccgtcctggtggacggtgaaaacgtcatccaggacagcttcaagatcgcccagtatctggaggaaaagtataccggcgccagcatcttccaagggaatctggcgctccatgagttcatctataactggatcgcggagatcaaggagccgctgttcaagctggtgatcctcgacatcgccaacaaactggactacgagtcgaaagagtactatatcaagaagaataccgcgctgtacggggatctcagcaccgccgccctgaaggatcgcgaggtcaacgtcaaacgtatccagaagaacctcaacctgctgctggacaacctgaagcaaaacaccttcctcagcggtgagaccatcggctggaccgatatctcgctggcgtccttcctctacatgatcaagctggccaacgagagcgtcctgaacgaggtcatcgccagcaccgaccaagacctcttcaatggctggtggaataacatgtcgaagctcatggtg

SEQ ID NO: 223 - protein, 252 aa, Artificial Sequence
  Description of Artificial Sequence: Synthetic polypeptide
MAKYTLYQLIGKAEHPDGRVISPHVWKTKLDLAYFDQEVKAEGKTFPQIRGELVETTKNSAVTVPTIVDDEGLVITDSWKIAEYLEAEHGSAEKSVFGGQVGKEFAKFVEIWSNTTLANEFRPLIAPAIFEHFDEPSKNYFIKSKFGDDLSRFEAHKSKFSDPSNLNAQLAAARTRLNVIETLLGYKKEKGEPLWLSGKPSHADFCLFGWYAASRINPAVERGVWRHEENPLVGEWLDLILGSGLVDQTQLN

SEQ ID NO: 224 - DNA, 756 bp, Artificial Sequence
  Description of Artificial Sequence: Synthetic polynucleotide
atggccaagtacaccctctaccagctgatcgggaaggcggaacacccggatggtcgggtcatctcgccgcacgtctggaagaccaagctggacctggcgtacttcgaccaggaggtcaaagcggaaggcaaaaccttcccccaaatccggggcgaactggtggaaaccacgaagaatagcgccgtcaccgtgccgacgatcgtcgacgacgaaggcctggtgatcaccgattcctggaagatcgcggagtatctggaagccgaacatgggagcgcggagaagtccgtgttcggtggccaggtgggtaaggagttcgcgaagttcgtcgaaatctggagcaataccaccctcgcgaatgagttccgcccgctgatcgcgcccgcgatcttcgagcacttcgacgagcccagcaagaactacttcatcaaaagcaagttcggcgatgacctctcgcggttcgaggcgcataaaagcaagttctcggaccccagcaacctgaatgcccagctggccgcggcgcgtacccggctcaacgtcatcgagaccctgctgggttacaagaaggaaaagggggaacccctgtggctgagcggcaagccctcccatgccgatttctgtctgttcgggtggtacgccgccagccgtatcaatccggccgtggagcgtggggtgtggcgccatgaagaaaacccgctggtgggcgaatggctcgacctgatcctgggctcgggtctggtggaccaaacccagctgaac

SEQ ID NO: 225 - protein, 232 aa, Artificial Sequence; identical to SEQ ID NO: 45
  Description of Artificial Sequence: Synthetic polypeptide

SEQ ID NO: 226 - DNA, 696 bp, Artificial Sequence
  Description of Artificial Sequence: Synthetic polynucleotide
atgcgggagccgctcaagctgtacgatctggccggcgccgacgagcgcgtgcgcttctcccccaactgctggcgtacgcgtttcgccctggcccacaaaggcctgccgtgcgagaccgtcgtctggcggttcatggagaaggacgccatcgccttcagcggccagggcaaggtgccggtgctggtcgacggcacccggcacgtgcacgactcctggaccatcgcgctgtatctggaagacacctatccggaccgcccctcgctgttcggcggtgccgccggccgcggtctggcgcgcttcgtcaaccagtggaccagcgaagtgctgcacccggccatcgcgaaggtggtcctgccggacctggtggatatcctgcacgagggcgaccgggattattaccgctcgacccgcgaagccgccttcggcaccaccgtgggggccctccgtgccgcccgtgaagacaatgtgaacgccctgcgcaccaccctgcgtccgctgcggtccaccctggcggatcagaagttcctggcgggggatgccccgaattacgccgaccacgtggcgttcagcgccttcctgtgggcccacgcctcctcgccggtgaaaatcctggcggccgatgatacgctccatgcctggtgtgggcgcatgttcgacgcctatgatggtctggcccgtctcctgcccgcggcggcg

SEQ ID NO: 227 - protein, 229 aa, Artificial Sequence; identical to SEQ ID NO: 47
  Description of Artificial Sequence: Synthetic polypeptide

SEQ ID NO: 228 - DNA, 687 bp, Artificial Sequence
  Description of Artificial Sequence: Synthetic polynucleotide
atgaaactcttcgagctggtgggcaccgacgccggccgtccgttctccccgttctgctggcgctcccgcctggccctggcccataagggcctgtcggtcgaaagcatcccgtggcgcttcaccgaaaagagcgccctggccccctatggcagcgaaaaggtccccgtgatgctcgaccgcgatcgcgccgtcgccgactcgtggatcatcgccacctacctggaagatacctacccggaccgcccctccctcttcggtggtgcgggcggccgtgcgatggcccggttcctgaacgcgtggggcgacatcgccatcgtcggcggtatcttccccctgatcatcgcggacatcccgaacaacctcgccgcggtggacgccgcctacttccgccagtcgcgcgaagcgcgtttcggcaagcgcctggaagagatcatggccccgcgggaccaagccgtcgtggggttccgcaagtccctcgaaccgctgcgccagacgctgaagacccaaccgttcctgggtggcgacgccccgaactacgccgactacatcgtgttcggcggtttccaatgggcccgcgtcgtcagccccttccgcctcctggaggagaccgactcggtgtacgcctggcgtgaacgcctgctcgacgccctcgacgggctggcgcgcaactccccgggctacccggtg

SEQ ID NO: 229 - protein, 237 aa, Artificial Sequence; identical to SEQ ID NO: 49
  Description of Artificial Sequence: Synthetic polypeptide

SEQ ID NO: 230 - DNA, 711 bp, Artificial Sequence
  Description of Artificial Sequence: Synthetic polynucleotide
atgatggccgccaatatcaccctgtacgagatcgcggtctccggcggcgcctccgcgagccccttcgtctggcgcatcaagttctccctggcccgcaagggcatcccgtaccgctcgaagatgctgggcctgaccgacatctcccggcagttcgacggccgcttccagacggtcccgatcatcgatttcggcgaccgccagatgaatgagtccatcgcgatcgcggactggctggacgaggcgtatcccgatctgccggcgatcttctcggggccggccgagcgcgcgatgatcgggttcttcgaccagtggctcctgcagctcatcgtgaccggcatcctgccgatctacgccctcgacgcgcatgacggcgccgccccgcatgatcgcgactactatcgccggtcgcgcgaatccttcttcggccagacgctggaggaagtggtcgtgaagcgcgaggagcgcctgccggacgtccgccggagcttcgaaccggtgcgtcagaccatcgtgaaccagcccttcctcggcggcaccagcccgaatttcgccgacatgtgcctgctgggcctcttcatcttcgtggggaccatcggcaccctgcccctgctggccgccgatgacccgctggtcgcctacgccgatcgcggtttcgcctgtttcccgagcgaaaccgcctcgctgcgcctgaagctcggcgagccgacgcgg

SEQ ID NO: 231 - protein, 229 aa, Artificial Sequence; identical to SEQ ID NO: 51
  Description of Artificial Sequence: Synthetic polypeptide

SEQ ID NO: 232 - DNA, 687 bp, Artificial Sequence
  Description of Artificial Sequence: Synthetic polynucleotide
atgacccgcaagctgtacgcgctctgtggcacggacaagtcccggcccttctcgccccacgtctggaaggcgaagctctcgctcgcccacaagggcctgaccttcgacgtcgcgccggtgggtttcaccgcgatcccgtccctggaagaaggcgccaccaagatcgtgcccctgctccgcgacggcgaaaagctggtgaacgactccttcgacatcgccctctacctggaggaaacgtatccggaccggcccagcctgttcgcgggcgagggtggtaaggcgatggcccgcttcgtggagtcctggtcccagaccgcgctgcacaccgccatcggtcgtatcgccatcatggacatccacgactcgctcgacccggtggaccaagcgtacttccgcgcctcgcgggagcaacgtttcggcaagtccctggaaaccgtcgccggtgccggccgcgaagatctggagatcttcagcgcgaagctggaacccctgcgccacatgctgaagtcgcaaccgttcctgggcggcaacagcccgctcttcgccgattacatcgtgttcggcgcgctccagtgggcgcgcatcgtctcgccgcagcgcctgctgtcggaaggcgatgtggtcacggactggttcgaacgctgtctggagctgcacggtggtctgggccgctccgtcacggcggcg

SEQ ID NO: 233 - protein, 232 aa, Artificial Sequence; identical to SEQ ID NO: 53
  Description of Artificial Sequence: Synthetic polypeptide

SEQ ID NO: 234 - DNA, 696 bp, Artificial Sequence
  Description of Artificial Sequence: Synthetic polynucleotide
atgaccatccgcctgtacgatctggccgccaccgaagggcgtcggctgtccccgttctgttggcgctcgaaatatgccctggcccataaaggcctggccttcgagaccgagccggtgggcttcaccgacatcccgaagctgtgcggcggccaatacaagaccgtgcccatcatcgaggacggcggtaagaccgtgtgcgactcgtgggccatcgcggactatctggacgcgacctatggcgacaagccgctcttcaccagcccccaggagaaggcgggcgtccgcttcttcgacacctggttctcgctggagatcatgacccgcatgttccgcatgttcgtcctggacatccacgaccgcgcgcgcccggaagatcagccctacttccgcgaatcccgcgagaaaatgatgcgcggcgccaccatggagcaattcgtggccgggcgtgaagaaaagctccccgaactgcgtcatgcgctgcgccccctgcggatgaccctcgccggccaaaaatggctgggcggcgaggtcccgaactacgccgactacatcgccctgggtggcttcctgtgggccgccagcgtgctgaccctgcccccgctcgaaaaggacgacgccctgcacgactggctgaagcggggcttcgacctgtacggcgggctgggccacagctcgaagacggaggccctcgccgcc

SEQ ID NO: 235 - protein, 273 aa, Artificial Sequence; identical to SEQ ID NO: 55
  Description of Artificial Sequence: Synthetic polypeptide

SEQ ID NO: 236 - DNA, 819 bp, Artificial Sequence
  Description of Artificial Sequence: Synthetic polynucleotide
atgggcgccggcttcctgatctccatcggtgaaccgctgttccactccgacccggagggtctgatcggcaaacaggccctgcggggccggcgtgccttccaggtcgatgtcgcgatgccgccgtccctcacgctctacgaactcaccggcgccgacgacgacctgcgcttctcgccccactgctggaagatccgcatggccctgctccacaagggcctggaggccgaccgccgcccctggcgcttcaccgaaaaggacgcgatcgccttctccggcggcgccaccgtcccggtgctggtcgacggggacaagacggtcaccgactcctggcgcatcgcgctgcatctggaggagcatcatgccgaccgcccgagcctgttcggctcggaaacgggtcggtcctacgcgcgcttcgtcaatagctacgcggacaccgtgctggtcgcgcccctccgccatctcctgacgctggacatcctggcccgcgtccacgaaaaggaccgtgactatttccgtgcctcccgggagaagcgcttcgggcaaccgctggaaacgcacgcgggtgacccggcggtgcacatcccggccttccgcgccgccctgacccccgtgcgcaccgtcgtggcggaacaaccgttcctgagcggtgccgccccggcctatgccgactattgtgccttcggcgcgctgatgtgggcccggtgcgtgagcccgctgcgcctgctggaaaaagacgacccggtgtacggttggcgcgagcgcatgctggacgccttcggcggccacgcgcgggcggcggcgtgcacggaacaagacgcc

SEQ ID NO: 237 - protein, 264 aa, Artificial Sequence
  Description of Artificial Sequence: Synthetic polypeptide
MLELYQFELSPYSEKVRLILDFKGLEYRKQEVTPGIGQFEVFRLSGQRQVPVLKDGSEAIADSTAIAQYLDQKFPEPPLTLADPQQQALNVLLEDWADRSFATDVRTVLLGALGWDPSLREAALPNQVPGPLRNLVSAVPSEVFSVLGSGVGLSPETLRTARLNLEQGLQALCQRLQNQPYLLGDRPVLADLAIAAHSLFLKFPTTAAIDIPAGLRGRGIPGLVDNPDYTVFFEWRDRLYRDFRRGAAVTPPSSGNGPTKISID

SEQ ID NO: 238 - DNA, 792 bp, Artificial Sequence
  Description of Artificial Sequence: Synthetic polynucleotide
atgctggaactgtatcagttcgagctctcgccgtacagcgaaaaggtccgcctgatcctggacttcaaggggctggagtatcgcaagcaggaggtcaccccgggcatcggccaattcgaggtcttccggctgtccggccagcgccaagtgccggtgctgaaggacggctcggaggccatcgccgattccaccgcgatcgcgcagtacctggaccagaagttccccgaaccgccgctgaccctcgccgacccgcagcagcaggccctgaatgtcctgctggaggattgggccgaccggtcgttcgccacggacgtgcgtacggtcctgctcggtgccctggggtgggacccgagcctccgcgaagcggccctccccaaccaggtcccgggcccgctgcgtaatctggtctcggccgtcccgtccgaagtcttctcggtcctggggtcgggcgtcggcctctccccggaaaccctccgcacggcgcggctgaacctggagcaaggcctgcaagcgctgtgtcagcgcctgcagaaccagccgtacctcctgggcgaccgtccggtcctggcggacctggccatcgcggcgcatagcctcttcctgaagttcccgacgaccgcggcgatcgatatcccggcgggtctgcgcggccgtggcatcccggggctcgtcgacaacccggattataccgtcttcttcgagtggcgcgaccgcctctatcgggacttccgccggggcgccgccgtcacgccgccgagcagcggtaatgggcccaccaagatcagcatcgac

SEQ ID NO: 239 - protein, 263 aa, Artificial Sequence
  Description of Artificial Sequence: Synthetic polypeptide
MLELYQWEFSQYSEKVRLILDYKGLEYRKIEVTPGIGQVELFRLTGQKQVPVLKDGNRYISDSTAIAKYLDLEYPDRPLLPTDPKQRGLTLLIEEWADESIGIKGRKALFSAISQDQSFRKALLPTSTPDVLKTLVEGVPTDLLTVLGFGVGYSPDVVKSAIADLKQDLEALTLLLADSPYLTGDEPTLADLAVAGLSILLKFPEGSYLDLPASIAGKGVPSLADNPDYAAFFAWRDRIYTQFRKPLIGKPPTGGAPTSIQID

SEQ ID NO: 240 - DNA, 789 bp, Artificial Sequence
  Description of Artificial Sequence: Synthetic polynucleotide
atgctggagctctaccagtgggagttcagccagtacagcgagaaggtccgcctgatcctggactacaagggcctggagtaccgcaagatcgaagtcacccccggcatcgggcaggtggagctgttccgtctgaccggccagaaacaggtcccggtgctgaaggacggcaaccgctacatcagcgacagcaccgcgatcgcgaagtatctggatctggagtatccggatcgcccgctcctcccgaccgatcccaaacaacgcggcctcaccctgctcatcgaggagtgggcggatgaaagcatcggcatcaagggccggaaggccctgttctccgccatcagccaggaccagagcttccgcaaggcgctgctgccgacctccaccccggacgtcctgaagaccctggtcgagggggtgcccaccgatctgctcaccgtcctgggcttcggggtgggttactcgccggacgtggtcaagagcgccatcgcggatctcaagcaggacctggaagccctgacgctcctgctggccgactcgccctacctgacgggcgacgaacccacgctcgcggacctggccgtcgccggcctgagcatcctgctgaagttcccggaaggcagctatctggacctgcccgcgtcgatcgccggtaaaggcgtcccctcgctggcggacaacccggactatgcggccttcttcgcctggcgtgaccgcatctacacccagttccggaaaccgctcatcggtaagcccccgaccggtggcgccccgacctccatccagatcgac

SEQ ID NO: 241 - protein, 210 aa, Artificial Sequence
  Description of Artificial Sequence: Synthetic polypeptide
MKLYTFDSAPNPARLKMFIDYKGIAIDTQQMDMAKAAQLDTSYTEIVPEATLPALVLDDGTRLTEVIAIAHYLEGIYPDRPLLGTTASERGLILNWNHRIFNTLFMACAEAFRNGHPAYAGRALPGPQNFEQIPALAERGKSRLMDGLEMINAELADRPFIAGQQLSFADIDLLAVMTFAKWAAKTEPTEAMSDLNAWRQRATEALHDNT

SEQ ID NO: 242 - DNA, 630 bp, Artificial Sequence
  Description of Artificial Sequence: Synthetic polynucleotide
atgaagctctataccttcgacagcgcgccgaacccggcgcgtctgaagatgttcatcgactacaagggcatcgccatcgacacgcagcagatggacatggcgaaggccgcccagctggacacgagctacacggagatcgtcccggaagcgaccctgccggccctggtgctggacgacggcacccgcctgacggaggtcatcgcgatcgcccactatctggaaggcatctacccggaccggcccctcctcggcaccaccgcctccgaacgtgggctcatcctgaattggaaccaccgcatcttcaacacgctcttcatggcgtgtgccgaagccttccgtaacggccatcccgcgtatgccgggcgtgccctgccgggcccccagaacttcgaacaaatccccgccctcgccgaacgcgggaaaagccgcctcatggatggcctggagatgatcaacgccgaactggcggaccggccgttcatcgcgggccagcagctgtccttcgccgatatcgatctgctggcggtcatgaccttcgccaaatgggccgccaaaacggaacccaccgaagcgatgagcgacctgaatgcctggcgccagcgcgccaccgaagccctccacgacaacacg

SEQ ID NO: 243 - protein, 263 aa, Artificial Sequence
  Description of Artificial Sequence: Synthetic polypeptide
MLELYQWELSHYSEKVRLILDYKGLDYRKIEVTPGMGQVDLFRLTGQRQVPVLKDGSRYIVDSTEIAKYLDLEYPERPLIPQDSKQRGLCLLMEEWADESIGVKGRKALFSAISQDQNFRKSLLPNSTPDVFKTLVAGVPSDVLTVLGFGVGYSPDVIKSAIADLKQDLESLTLILADSPYLTGDEPTLADLAVASLSILLKFPDVPYLDLPASLLGKGVPGLADNPNYELFFSWRDRLYAQFRKPLIGTPTTGSAPTSIQIE

SEQ ID NO: 244 - DNA, 789 bp, Artificial Sequence
  Description of Artificial Sequence: Synthetic polynucleotide
atgctggaactctaccaatgggaactgtcgcattactcggagaaggtccgcctgatcctcgactacaaaggcctggactaccgcaagatcgaggtgacccccggcatggggcaggtcgacctgttccgcctgaccggccaacgtcaggtgcccgtgctcaaggacggctcccgctacatcgtcgacagcaccgagatcgccaagtacctcgacctggagtacccggagcggcccctgatcccgcaggactcgaagcagcgcggtctgtgcctcctgatggaggaatgggccgacgagtccatcggcgtgaaggggcggaaggccctgttctcggccatctcccaggaccaaaacttccgcaagagcctgctgccgaacagcaccccggatgtcttcaagaccctggtcgcgggtgtcccctccgacgtcctcaccgtcctgggcttcggtgtgggctactcccccgacgtgatcaagagcgcgatcgccgacctgaagcaggacctggagagcctcacgctgatcctggcggactccccgtatctgaccggcgacgagccgacgctggcggacctggcggtcgcctccctgagcatcctgctcaagttcccggacgtcccgtacctcgacctgcccgcgtcgctgctgggcaagggtgtgcccggcctggccgacaacccgaactatgaactgttcttctcctggcgggaccgcctgtacgcccagttccgcaaaccgctcatcggtaccccgaccaccggtagcgccccgaccagcatccagatcgaa

SEQ ID NO: 245 - protein, 228 aa, Artificial Sequence
  Description of Artificial Sequence: Synthetic polypeptide
MSDIILHQWEISPFCQKVSRILKFKGISFETVNYNGILGAKVPLLSKVGKVPVIDHNGQRIQDSTRIARYLDETYPDTPRLYPEDPNQKALAELWEDWADESLYFYEVYLRVNDSEALDEAIRISSIGRPAYEKPMVKGFILAELKTQLFFQGLGRMKAEHVEEEFRRHLGRIEQVLSQSEWLVGDSQTIADIAVVAQLGEVIRTSKKFSKEILDRPSIALWYKKQTG

SEQ ID NO: 246 - DNA, 684 bp, Artificial Sequence
  Description of Artificial Sequence: Synthetic polynucleotide
atgtccgacatcatcctgcaccaatgggagatctccccgttctgtcagaaggtgtcccgcatcctcaagttcaaggggatctcgttcgagaccgtgaactataacggcatcctgggcgcgaaggtccccctgctgtccaaggtcggcaaggtgccggtgatcgatcataatggccagcgcatccaggactccacccgcatcgcccgttatctcgacgaaacctatccggacacgccccgcctgtatccggaggacccgaatcagaaggccctggccgagctgtgggaagactgggcggacgaaagcctgtacttctacgaagtgtacctgcgtgtgaacgactccgaagccctcgacgaggccatccgcatcagcagcatcggccggcccgcctacgaaaagccgatggtgaagggtttcatcctggcggagctgaagacgcagctcttcttccagggcctgggccgcatgaaagcggaacacgtcgaggaagagttccgccgccacctgggtcgcatcgaacaagtgctgagccagtccgaatggctggtcggcgactcgcaaacgatcgccgacatcgccgtggtcgcccaactcggtgaggtcatccgcacctccaagaagttctcgaaggaaatcctcgatcgtccgtcgatcgccctctggtacaagaagcaaacgggc

SEQ ID NO: 247 - protein, 213 aa, Artificial Sequence
  Description of Artificial Sequence: Synthetic polypeptide
MAIKVHGPMMSPAVMRVVATLKEKDLDFELIPVNMQAGDHKKEPFISLNPFGQVPAFEDGDLNLFESRAITQYIAHTYADKGNQLLPNDPKKMAIMSVWIEVEAQKFDPIGSKLGFEIVIKPMLGMVTDDAVVAENEEKLGKLLDVYESRLKESKYLGGESFTLADLHHAPSLHYLMGSKVKSLFDARPHVSAWCADILARPAWSKTLELSKQ

SEQ ID NO: 248 - DNA, 639 bp, Artificial Sequence
  Description of Artificial Sequence: Synthetic polynucleotide
atggcgatcaaggtccacggcccgatgatgagccccgcggtgatgcgcgtggtggcgacgctgaaggagaaggacctggatttcgagctgatcccggtgaacatgcaggccggcgaccacaagaaggagccgttcatctcgctgaacccgttcggccaagtccccgcgttcgaggacggtgatctcaacctgttcgaatcccgcgcgatcacccagtacatcgcgcacacgtacgcggacaagggcaaccagctgctgccgaacgacccgaagaaaatggcgatcatgagcgtgtggatcgaagtcgaggcccagaagttcgaccccatcggctcgaagctgggcttcgagatcgtcatcaagcccatgctgggcatggtgacggatgatgcggtcgtcgccgagaacgaggaaaagctcggcaagctgctcgacgtgtacgagtcgcggctgaaggagagcaagtatctgggtggcgagtcgttcaccctggccgacctccatcacgccccctccctgcactatctgatgggctccaaggtgaagtccctgttcgacgcccgtccgcacgtctcggcgtggtgtgcggacatcctggcgcggccggcctggtccaagacgctggagctgtccaagcaa

SEQ ID NO: 249 - protein, 229 aa, Artificial Sequence
  Description of Artificial Sequence: Synthetic polypeptide
MAGGDDLKLLGLWASPYVLRVKLALSLKGLSYENVEEDLRDKSELLLKSNPVHQKVPVLIHGGKPICESQVILQYIDEAFAGTGPSLLPADPYERAVARFWAAYIDDKMLPAWNQSTMGKTEEERAEGKKQSVVTVETLEGALRDCGGQGKPFFGGDSVGYVDVVLGGLLGWVRASEELHGVRPFDPERTPLLAAWSERFGALDAVQTVMPDVGRLLEFGKALMARLAA

SEQ ID NO: 250 - DNA, 687 bp, Artificial Sequence
  Description of Artificial Sequence: Synthetic polynucleotide
atggcgggcggcgatgacctgaagctgctgggcctgtgggcctcgccgtatgtgctgcgcgtgaagctcgccctgtccctgaagggcctgtcctatgagaatgtggaggaggacctgcgggataagtcggagctcctgctgaagtcgaacccggtccaccagaaggtcccggtcctgatccatggcggcaaacccatctgcgagtcccaggtcatcctgcagtatatcgacgaggccttcgcgggcaccggcccgtcgctcctgccggccgacccctatgaacgggcggtggcgcgcttctgggcggcctacatcgacgacaagatgctgccggcctggaatcagtccaccatgggcaagaccgaggaggagcgcgcggagggtaagaaacaatcggtggtgaccgtggaaaccctggagggcgccctgcgcgactgcggcggtcagggtaaaccgttcttcggcggtgatagcgtcggctacgtcgatgtcgtgctgggcgggctgctgggctgggtgcgcgccagcgaagaactgcatggtgtccgtcccttcgaccccgagcggacgccgctgctggccgcctggtcggaacgtttcggggcgctggacgcggtgcaaaccgtcatgccggacgtggggcggctcctggagttcggcaaggccctgatggcccgtctggcggcc

SEQ ID NO: 251 - protein, 243 aa, Artificial Sequence
  Description of Artificial Sequence: Synthetic polypeptide
MAAGGGGGDELKLLGLWASPYVLRAKFALSFKGLSYENVEEDLHNKSELLLSSNPVHKKVPVLIHNGKPICESQIIVEYVDEAFPDAGESLLPSDPYDRAVARFWAAYINDKFMPAWQKASLGLTEKKKAKAVKQMLAAIENLETAFKELSKGKPFFGGDTAGYLDVTLGAVVGWARAGEVLFGRKLFDATRSPLLAAWMERFVALDAVKAVLPDNAELIEYGKMRMAHYAKLAAALAAANKK

SEQ ID NO: 252 - DNA, 729 bp, Artificial Sequence
  Description of Artificial Sequence: Synthetic polynucleotide
atggcggcgggcggtggtggcggggatgagctgaaactgctggggctgtgggccagcccgtacgtgctgcgcgccaagttcgccctgtccttcaagggcctgtcctacgagaacgtcgaagaggacctgcacaacaagagcgagctgctcctgagcagcaacccggtgcataagaaagtgccggtgctgatccacaatggcaagccgatctgtgagtcccagatcatcgtggagtacgtggacgaggcgttcccggacgcgggtgagtccctcctgccctcggacccgtacgatcgggcggtggcccggttctgggccgcgtacatcaacgacaagttcatgcccgcctggcagaaggccagcctgggcctgaccgaaaagaagaaggcgaaggcggtcaagcagatgctggcggcgatcgagaacctcgaaaccgccttcaaggagctgagcaaggggaagccgttcttcggcggggacaccgcgggctatctggacgtcaccctcggggccgtcgtcggctgggcccgcgccggcgaagtcctcttcgggcgcaagctgttcgacgcgacccgctcccccctgctggcggcctggatggaacggttcgtggcgctcgatgccgtgaaggcggtgctccccgacaatgcggaactgatcgagtacggcaagatgcgcatggcccattacgcgaagctcgcggcggcgctggccgccgccaacaagaag

SEQ ID NO: 253 - protein, 209 aa, Artificial Sequence
  Description of Artificial Sequence: Synthetic polypeptide
MGLKLYGPTLSPNVVRVIAVLNEKGLDFELIPVDMKSGEHKKPEFLQINPFGQVPALEDGDIKLFESRAICRYLATKYKESGTDLLPAKTAAEMAATEIWLEVESQQFSQPISKVCFELLIKPILGMVTDEEAAEKHATDAIKILDVYEARLSQSKHLAGDEFTLADCNHMAWLNVLMMTKKACLVNDRPHLKAWWEIVSARPAWQKTA

SEQ ID NO: 254 - DNA, 627 bp, Artificial Sequence
  Description of Artificial Sequence: Synthetic polynucleotide
atgggcctcaaactctacggtccgaccctgtcgcccaacgtggtccgcgtcatcgccgtcctgaatgagaagggcctggacttcgagctgatcccggtcgacatgaagagcggggagcacaagaagccggagttcctgcagatcaatcccttcggccaagtccccgccctggaggacggcgacatcaagctgttcgaaagccgtgcgatctgccgctacctggcgacgaagtacaaggaaagcggcacggacctgctgcccgccaaaaccgcggccgagatggccgcgaccgaaatctggctggaggtcgaaagccagcaattcagccagccgatctcgaaggtgtgcttcgaactgctgatcaaaccgatcctggggatggtgaccgacgaagaagcggcggagaaacatgccaccgatgccatcaagatcctggatgtctacgaggcccgtctctcccaatcgaagcacctggccggggacgagttcaccctggcggactgtaaccacatggcctggctgaacgtcctgatgatgaccaagaaggcgtgcctggtgaatgaccgcccccatctgaaggcgtggtgggaaatcgtgtccgcgcgtccggcctggcagaagaccgcc

SEQ ID NO: 255 - protein, 225 aa, Artificial Sequence
  Description of Artificial Sequence: Synthetic polypeptide
MAEVKLHGFWYSPYTLRVVWTLNLKGIPYENIEEDRFNKSPLLLQYNPIHKKTPVLVHDGKPICESMIIVEYIDEIWPQNTLLPADPYDRAQARFWVKYVDELISVIAAFLHSKVGEEREKARENLWERLRVIEDQCLDDRKTFYGGDTINIVDIALGSFIKFIEVQEDMFKVKILQSERFPRLHLWFNNFKDAPVIKENTPDQEKLVAFLNPLIEKIKAVKASS

SEQ ID NO: 256 - DNA, 675 bp, Artificial Sequence
  Description of Artificial Sequence: Synthetic polynucleotide
atggcggaagtgaagctgcacggcttctggtatagcccgtacaccctccgcgtggtgtggaccctgaacctgaagggcatcccgtacgaaaacatcgaagaggaccgcttcaataagtccccgctcctgctccagtataacccgatccacaagaaaacccccgtgctggtgcatgatggcaagccgatctgcgaatccatgatcatcgtggagtacatcgacgaaatctggccgcagaacaccctcctcccggcggacccgtacgaccgcgcgcaagcgcgtttctgggtcaagtatgtggacgagctgatctcggtgatcgcggccttcctgcattccaaggtcggcgaagagcgcgaaaaggcccgtgaaaacctgtgggagcggctgcgtgtgatcgaagatcagtgtctggacgatcgcaagaccttctacggcggggacaccatcaacatcgtcgacatcgcgctgggcagcttcatcaagttcatcgaggtgcaggaggacatgttcaaggtgaagatcctgcagtccgagcgcttcccgcggctgcacctgtggttcaataacttcaaggacgcgccggtcatcaaggagaacaccccggaccaagagaaactcgtggccttcctcaacccgctgatcgagaagatcaaggccgtgaaggcgagctcc

SEQ ID NO: 257 - protein, 221 aa, Artificial Sequence
  Description of Artificial Sequence: Synthetic polypeptide
MTVKLHGFWYSPFTLRVVWTLNLKGIPYENIEEYRFNKSPLLLQYNPIYKKTPVLIHDGKPICESMIIVEYIDEIWPHNSLLPADPYDRAQARFWVKYVDELISAIEPFLNSISGEEREKARENLWERLKVIEDWCLDDKKKLYGGDTINIVDIALGSFVKFIEIQEDMFEVKVLQSERFPRLHLWFNNFKDVPVIKGNTPGQEKLVAFGKCLIEKILVSF

SEQ ID NO: 258 - DNA, 663 bp, Artificial Sequence
  Description of Artificial Sequence: Synthetic polynucleotide
atgaccgtcaagctccatggcttctggtactcgccgttcaccctgcgggtcgtgtggacgctcaatctgaagggcatcccctacgaaaatatcgaggagtaccggttcaacaaatccccgctgctgctgcagtacaaccccatctacaagaagacccccgtcctcatccacgacggcaagccgatctgcgaaagcatgatcatcgtggagtacatcgacgagatctggccccataacagcctgctgccggccgatccgtatgatcgtgcgcaagcgcgcttctgggtcaagtatgtggatgagctgatctccgccatcgagccgttcctcaactcgatctccggcgaagaacgcgagaaagcccgggagaacctgtgggagcggctgaaggtgatcgaggattggtgcctggatgacaagaagaagctgtatggtggcgacacgatcaacatcgtggacatcgccctggggagcttcgtcaagttcatcgaaatccaagaggacatgttcgaggtcaaggtcctgcaatcggaacgcttcccccgcctccacctgtggttcaataacttcaaggacgtgccggtcatcaaggggaacaccccgggccaagagaagctcgtcgccttcgggaagtgcctcatcgagaagatcctggtctcgttc

SEQ ID NO: 259 - protein, 213 aa, Artificial Sequence
  Description of Artificial Sequence: Synthetic polypeptide
MAIKVHGPMMSPAVVRVVATLNEKNLDFEFIHVDLQKGDHKKEPFISLNPFGQAPAFEDGDLKLFESRAITQYIAHTYADKGNQLLPNDPKKMAIMSVWIEVEAQKFDPVGSKLSYEIVIKPMLGMVSDDAIVTENEEKLSKLLDVYESRFKNSKYLGGDSFTLADLHHAPVLHYLIGTKMKSLFNSRPHVSAWVADILARPAWSKTLELSKQ

SEQ ID NO: 260 - DNA, 639 bp, Artificial Sequence
  Description of Artificial Sequence: Synthetic polynucleotide
atggcgatcaaagtccatggtcccatgatgtcccccgcggtcgtgcgggtcgtggccaccctcaacgagaagaacctcgacttcgagttcatccacgtggatctgcagaagggcgaccataagaaggagccgttcatcagcctgaacccgttcggtcaagcccccgccttcgaggacggtgacctcaagctgttcgagagccgcgccatcacccagtatatcgcccatacctatgccgacaagggcaaccagctcctgccgaacgatccgaagaaaatggccatcatgagcgtgtggatcgaggtcgaggcccaaaagttcgaccccgtggggtccaagctctcgtacgagatcgtcatcaagccgatgctgggcatggtctccgatgatgcgatcgtgaccgagaacgaggaaaagctgtcgaagctcctcgacgtgtacgagagccgcttcaagaacagcaagtatctcgggggtgacagcttcaccctggcggacctgcatcacgcgcccgtgctgcactatctgatcggcaccaagatgaagtcgctgttcaacagccgtccccacgtctccgcctgggtggccgacatcctggcgcgtccggcctggtcgaagaccctggaactgtcgaagcag

SEQ ID NO: 261 - protein, 254 aa, Artificial Sequence
  Description of Artificial Sequence: Synthetic polypeptide
MPIPDEKIFPHATGAAAKTVEQHQDPQELVFYAGWFCPFVQRTWIALEERGIPYQYKEVNPYKKEKHFLDINPKGLVPAIEYKGKALYESIILCEFLEDAYPNYKPKLLPEDPFERAYARIWLDYISKSIIPANFRLIQAQTPEKQQEALADFNKALKQFAEKIKGPYFLGEQFSLVDIAIVPWIVRDYIIAENRGFKREDIGSKWVEYASKLEKRDSVARTSSEHYAEIYGRYLRDEAQSEAAKATRAGRDIP

SEQ ID NO: 262 - DNA, 762 bp, Artificial Sequence
  Description of Artificial Sequence: Synthetic polynucleotide
atgccgatcccggacgaaaagatcttcccccatgcgaccggcgcggcggccaagaccgtcgagcagcatcaggacccgcaggagctcgtcttctatgccgggtggttctgtccgttcgtgcagcgtacctggatcgcgctggaggagcgcggcatcccgtatcagtacaaggaagtcaacccgtacaagaaggagaagcatttcctggacatcaacccgaagggcctggtgccggccatcgagtacaagggcaaggcgctctacgagagcatcatcctgtgcgagttcctggaggatgcctaccccaattacaagccgaaactgctgccggaagacccgttcgagcgtgcctacgcgcgtatctggctggactacatctccaagtccatcatcccggccaacttccgcctcatccaggcccaaacgccggagaaacagcaagaagcgctcgcggacttcaacaaggcgctgaagcagttcgccgagaaaatcaagggcccctacttcctcggggaacagttcagcctcgtggacatcgccatcgtgccctggatcgtccgcgactatatcatcgccgagaatcgcggcttcaaacgcgaggatatcggctcgaagtgggtcgagtacgcctcgaaactcgaaaagcgtgattccgtggcgcgtaccagcagcgagcactacgcggaaatctacgggcggtacctgcgcgatgaagcgcagagcgaagccgccaaggccacccgtgccggccgcgacatcccc

SEQ ID NO: 263 - protein, 237 aa, Artificial Sequence
  Description of Artificial Sequence: Synthetic polypeptide
MATAGGGAGHLKLLGAWPSPFVNRVRMALHLKGLEYENVEEDLTNKSDLLLASNPVHKLVPVLLHGDKPISESLVIVEYLDDAFPGAGQAVLPADPYERAVARFWAKYVDGKLHGMMVKALMGATEEERATATADALAAMDTLEGAFAECSGGKEFFAGDAPGYLDVALGGFIGWLRAWDKVGGVKLLDAGRAPRLATWAERFAALDVAKEVIPDPDHIAEFAKVLQARSAAAATSN

SEQ ID NO: 264 - DNA, 711 bp, Artificial Sequence
  Description of Artificial Sequence: Synthetic polynucleotide
atggccacggcgggcggaggcgcgggacacctgaagttgctcggcgcctggccgagtccgttcgtcaaccgggtccgcatggccctgcatctcaaggggctggaatatgaaaatgtggaggaagacctgacgaacaagtcggacctgctgctggcgtccaatccggtccacaaactggtccccgtcctgctgcatggcgacaagccgatcagcgagagtctggtaatcgtagaatatctggacgacgcgtttccgggcgccggccaagcggtcctgccggcggacccgtacgagcgtgccgtggcccgcttctgggccaagtatgtggacggcaagctgcacggcatgatggtcaaggcgctgatgggcgccaccgaagaggagcgtgccaccgcgacggcggacgccctggcggccatggacacgctggaaggggcgttcgcggaatgttcgggcggcaaggagttcttcgccggcgatgcccccggctacctcgacgtagccctcgggggcttcattggctggctccgcgcctgggacaaggtgggaggcgtaaagctgctggacgccggccgcgccccccgcctggccacgtgggcggagcgcttcgcggcgctggacgtcgcgaaagaggtcatccccgacccggaccatattgcggagttcgcgaaggtcctgcaagcgcgctcggccgccgccgcgaccagcaac

SEQ ID NO: 265 - protein, 225 aa, Artificial Sequence
  Description of Artificial Sequence: Synthetic polypeptide
MAEVKLHGFWYSPYTLRVVWTLNLKGIPYENIEEDRFNKSPLLLQYNPIHKKTPVLVHDGKPICESMIIVEYIDEIWPQNTLLPADPYDRAQARFWVKYVDELISVIVAFLHSKVGEEREKARENLWERLRVIEDQCLDDRKTFYGGDTINIVDIALGSFIKFIEVQEDMFKVKILQSERFPRLHLWFNNFKDAPVIKENTPDQEKLVAFLNPLIEKIKAVKASS

SEQ ID NO: 266 - DNA, 675 bp, Artificial Sequence
  Description of Artificial Sequence: Synthetic polynucleotide
atggcggaggtgaagctccatggcttctggtactccccctataccctccgggtggtgtggaccctgaacctgaagggcatcccgtacgagaacatcgaagaggatcgcttcaacaagtcgcccctgctgctccaatacaatcccatccacaagaagaccccggtcctggtgcatgacggcaagcccatctgtgagtcgatgatcatcgtcgagtacatcgacgagatctggccccaaaacaccctgctgcccgcggacccgtacgaccgtgcccaggcgcgcttctgggtcaagtacgtggacgaactcatcagcgtgatcgtggcgttcctccacagcaaggtcggggaagagcgtgaaaaggcccgtgaaaacctgtgggaacgtctgcgcgtgatcgaagaccagtgtctggacgatcgtaagaccttctacggcggggacacgatcaacatcgtggatatcgcgctcggcagcttcatcaagttcatcgaggtccaggaggacatgttcaaggtcaagatcctgcagagcgaacggttcccgcgtctgcacctgtggttcaacaacttcaaggatgcgcccgtcatcaaggagaacaccccggaccaggagaagctggtcgccttcctgaacccgctgatcgagaagatcaaggcggtcaaagcctcctcc

SEQ ID NO: 267 - protein, 229 aa, Artificial Sequence
  Description of Artificial Sequence: Synthetic polypeptide
MSNPVLYSYFRSSCSWRVRIALNLKGVEFETKAVHLVKDGGEQLKDAYKDVNPMAQVPTLVHEGLTLTQSMAIMEYLEEKYSSEGSSLLPKDPIDRAHVREISEVISSGTQPIQNLSVMLKFSSEADKRSEWSNYWITKGFQGLEALLSKYSGKYCVGDEVSMADCCLIPQVYNANRFKVDMSSFPIISRICKGLESLEAFQKAHPTAQPDCPSDLKQFSGVTLFLVYI

SEQ ID NO: 268 - DNA, 687 bp, Artificial Sequence
  Description of Artificial Sequence: Synthetic polynucleotide
atgagcaatcccgtgctgtactcctacttccggtcctcctgctcgtggcgtgtccgtatcgcgctgaacctgaagggggtggagttcgagaccaaggccgtgcacctcgtgaaggatggcggcgagcaactcaaggacgcgtacaaggatgtcaatccgatggcgcaggtccccaccctggtccacgaagggctcaccctgacccagagcatggccatcatggagtacctggaggaaaagtactccagcgagggtagctccctgctcccgaaggacccgatcgaccgtgcgcacgtccgggagatctcggaagtgatcagctccggcacccaaccgatccagaacctgagcgtcatgctgaagttcagcagcgaagcggacaaacggtcggagtggagcaactactggatcaccaaggggttccaggggctggaagccctcctgtcgaaatatagcggcaagtactgtgtcggcgatgaagtgagcatggccgattgttgcctgatcccccaggtctacaacgcgaaccggttcaaggtcgacatgagcagcttcccgatcatctcgcgtatctgcaagggcctggagtccctggaagccttccagaaggcgcatcccaccgcgcagcccgattgtcccagcgatctcaagcagttctccggggtgacgctcttcctggtctatatc

SEQ ID NO: 269 - protein, 217 aa, Artificial Sequence
  Description of Artificial Sequence: Synthetic polypeptide
MVLKLYGAPMSTCTSRVLTCLHEKNLDFELVPVDLFAGEHKQPPFLAKNPFGQIPALEEDDLTLFESRAITSYLAEKFKGTGYDLIRHENLKEAASVKVWTEVESHRYNPAIAPIVFQFMVAPLRGNSPDQTIIDDNVEKLGKVLDIYEAKLSSTKYLAGDFYSLADLHHLPYTYYLMKTPAASVVNERPHVKAWWEDISSRPAFKKVAEGMNFVKK

SEQ ID NO: 270 - DNA, 651 bp, Artificial Sequence
  Description of Artificial Sequence: Synthetic polynucleotide
atggtgctgaagctgtacggcgccccgatgtccacctgcaccagccgcgtgctgacgtgcctgcacgagaagaacctggatttcgaactggtgccggtcgacctgttcgccggtgaacacaagcaacccccgttcctcgccaagaaccccttcggtcagatcccggccctggaggaggatgacctgaccctgttcgagagccgggccatcaccagctacctggccgagaagttcaagggcaccggctacgacctgatccggcatgagaacctgaaggaagccgcgtcggtcaaggtgtggaccgaagtggagagccaccgctataacccggccatcgccccgatcgtgttccagttcatggtggccccgctgcgtggtaattccccggaccagaccatcatcgacgacaacgtggagaagctggggaaagtgctggacatctacgaggccaagctgtcgtcgacgaagtacctcgcgggtgacttctatagcctggccgatctgcaccatctgccgtacacctactacctgatgaagaccccggccgcctcggtggtgaacgaacggccgcatgtcaaggcctggtgggaagacatctcgtcccggcccgccttcaagaaagtcgcggaaggcatgaacttcgtgaagaag

SEQ ID NO: 271 - protein, 214 aa, Artificial Sequence
  Description of Artificial Sequence: Synthetic polypeptide
MATIKVHGSPISTATMRVTATLYEKELEFEFVSINMRNGEHKKEPFISINPFGQVPAFEDGDLKLFESRAITQYIDHEYADKGTKLTSSDSKKMAIMSVWSEVESLHYDKVASILVWELGIKTLFGIPLDSKVVEENEAKLDSILDVYEKRLSESKYMGGECFTLVDLHHLPSLHYLMKSQSKKLFESRPYVNAWVDDITARPAWSKVLAMIPN

SEQ ID NO: 272 - DNA, 642 bp, Artificial Sequence
  Description of Artificial Sequence: Synthetic polynucleotide
atggcgaccatcaaagtccatggcagcccgatcagcaccgcgaccatgcgcgtgaccgcgaccctgtacgagaaggagctggagttcgagttcgtcagcatcaatatgcggaacggcgaacacaagaaggagccgttcatctccatcaaccccttcggccaagtcccggccttcgaggacggcgatctcaagctcttcgagtcccgcgccatcacccagtacatcgaccacgagtatgcggacaagggcaccaagctgacctcctccgattccaagaagatggcgatcatgagcgtctggagcgaagtggagtcgctgcattacgacaaggtcgcctcgatcctcgtctgggaactcgggatcaaaaccctcttcggcatcccgctcgactccaaggtcgtcgaggagaacgaagccaagctggattccatcctggacgtctacgagaagcggctgtccgaaagcaaatatatgggcggcgagtgtttcaccctggtggacctgcaccatctgccgagcctccactacctcatgaagagccaatcgaagaagctgttcgaatcgcggccgtacgtcaacgcctgggtggacgacatcacggcgcgtccggcgtggagcaaagtcctggccatgatcccgaac

SEQ ID NO: 273 - protein, 212 aa, Artificial Sequence
  Description of Artificial Sequence: Synthetic polypeptide
MGLKLYGPTLSPNVVRVIAVLNEKGLDFELIPVDMKSGEHKKPEFLQINPFGQVPALEDGDIKLFESRAICRYLATKYKESGTDLLPAKTAAEMAATEIWLEVESQQFSQPISKVCFELLIKPILGMVTDEEAAEKHATDAIKILDVYEARLSQSKHLAGDEFTLADCNHMAWLNVLMMTKKACLVNDRPHLKAWWEIVSARPAWQKTAAAK

SEQ ID NO: 274 - DNA, 636 bp, Artificial Sequence
  Description of Artificial Sequence: Synthetic polynucleotide
atggggctgaagctgtatggcccgacgctgtccccgaatgtggtccgcgtgatcgcggtgctcaatgagaagggcctggacttcgagctgatcccggtggacatgaagtccggcgaacacaaaaagcccgagttcctccagatcaacccgttcggtcaggtgcccgccctcgaagatggcgacatcaagctgttcgagtcccgtgccatctgccgctacctcgcgaccaagtacaaagagtcgggcaccgacctcctcccggcgaaaaccgccgcggaaatggcggcgaccgagatctggctggaagtggagagccagcagttctcgcagccgatcagcaaagtctgcttcgagctgctgatcaagccgatcctgggcatggtgaccgacgaggaagccgccgagaagcatgccaccgacgccatcaagatcctcgacgtgtatgaagcccgtctgtcgcagtccaagcatctggcgggtgacgagttcacgctggccgattgcaaccacatggcgtggctcaacgtgctcatgatgaccaagaaggcgtgcctggtgaacgaccgcccgcatctgaaggcgtggtgggagatcgtgtcggcgcgcccggcctggcaaaagaccgccgccgccaag

SEQ ID NO: 275 - protein, 236 aa, Artificial Sequence
  Description of Artificial Sequence: Synthetic polypeptide
MAGRDDEPKLLGTFASPFVMRAKLALSFKGLSFEDVEEDLANKSELLLESNPAQKKVPVLIHNGKPVCDSQVIVQYIDEAFSGNGTSLLPADPYERAVARFWAAYVDDKLLASWLQAARGKTEEEKAEGLKQTLVAVETMEAAFKACSNGKPFFGGDRVGYLDVTLGGLVVWVHAGAALYGMRLFDDAKSPLLAAWVERFGALDAAKAVLPAVDRVVELAKMRQAQAAAPATAGGN

SEQ ID NO: 276 - DNA, 708 bp, Artificial Sequence
  Description of Artificial Sequence: Synthetic polynucleotide
atggcgggccgcgacgacgaacccaagctgctggggacgttcgcctccccgttcgtcatgcgggcgaagctggccctgagcttcaagggcctctccttcgaggatgtcgaggaggacctggccaataagagcgaactgctgctggagagcaaccccgcgcagaagaaggtcccggtgctgatccacaatggcaagccggtgtgcgacagccaagtcatcgtccagtacatcgatgaagccttctccgggaacggcacgtccctcctccccgcggacccgtacgaacgtgccgtggcccgcttctgggccgcctacgtcgacgacaagctcctcgcgtcgtggctccaagccgcgcgtggcaagacggaggaagaaaaggcggagggcctgaaacagacgctcgtggcggtcgagaccatggaagcggccttcaaggcctgcagcaacggtaagccgttcttcggcggcgaccgcgtgggttatctggacgtcaccctgggtggcctcgtcgtctgggtgcatgccggcgccgccctgtatggcatgcggctcttcgacgatgcgaagtcgccgctgctcgcggcgtgggtcgagcggttcggtgcgctggatgccgccaaggccgtgctccccgcggtcgaccgtgtcgtggagctcgccaagatgcgccaggcccaagccgcggcccccgcgaccgcgggcggcaac

SEQ ID NO: 277 - protein, 213 aa, Artificial Sequence
  Description of Artificial Sequence: Synthetic polypeptide
MAIKVHGPIMSPAVMRVVAALKEKNLEFELVPVNMQNGDHKKEPFITLNPFGQVPAFEDGDLKLFESRAITQYIAHTYADKGSQLLPNDPKKMAIMSVWMEVEAQKFDPVGSKLAYEIAIKPMMGKVTDDAIVAENEEKMGKLLDVYEARLKESKYLGGDSFTLADLHHAPGLHYLFGTKVKSLFDARPHVSAWCADVLARPAWSKTLELNKQ

SEQ ID NO: 278 - DNA, 639 bp, Artificial Sequence
  Description of Artificial Sequence: Synthetic polynucleotide
atggccatcaaggtgcacggcccgatcatgagcccggcggtgatgcgggtggtggccgccctgaaggagaagaacctggagttcgaactggtgccggtgaatatgcagaacggcgaccacaagaaggagcccttcatcaccctcaacccgttcgggcaggtcccggccttcgaggacggggatctgaagctcttcgagagccgtgccatcacccagtatatcgcccacacctacgccgataagggcagccagctcctgccgaacgatccgaagaagatggccatcatgagcgtgtggatggaggtggaggcccagaagttcgaccccgtcggctccaagctcgcgtacgaaatcgccatcaagccgatgatgggtaaggtcaccgacgacgccatcgtggcggaaaacgaggagaagatgggcaagctgctggacgtgtacgaagcgcggctgaaagagagcaagtacctgggcggggattcgttcaccctcgccgacctgcaccatgcgccgggcctccattacctgttcggcacgaaggtgaagtcgctgttcgacgcccgtccgcatgtctccgcctggtgtgcggacgtcctggcccgcccggcctggtcgaaaaccctggaactcaacaagcag

SEQ ID NO: 279 - protein, 237 aa, Artificial Sequence
  Description of Artificial Sequence: Synthetic polypeptide
MAAEDELKLLGFWASPYVCRVKLALHLKGLIYDYVEEDVFTNKSELLLSCNPVHAKVPVLIHNGKPICESQVIVQYIDEVFPDAGVTLLPADPHDRAAARFWAAYIDDKLLPPWVHAYRGKTDEEKAERMKQTLAVVDALETAMEECSKGNAFFGGDTVGYVDVALGGLLSWLHGTEELCGTKILDAAKTPLLSAWARRFGELDAANAALPDVGRLVEFCKMRHVELEAAEAAAARN

SEQ ID NO: 280 - DNA, 711 bp, Artificial Sequence
  Description of Artificial Sequence: Synthetic polynucleotide
atggcggcggaggatgagctgaagctgctggggttctgggccagcccctacgtgtgccgggtcaagctggccctccacctcaagggcctgatctatgactacgtggaggaggacgtgttcaccaacaagtccgagctgctcctgtcctgcaatccggtccacgcgaaggtcccggtgctcatccacaacggcaagccgatctgcgaatcgcaggtcatcgtccaatacatcgacgaggtcttcccggacgccggggtgaccctgctgcccgccgatccccacgaccgcgccgccgcccggttctgggccgcctacatcgacgacaagctcctgccgccgtgggtccatgcgtaccgtggcaagaccgacgaagagaaggccgagcgcatgaagcaaaccctggcggtcgtcgatgccctggaaaccgccatggaggagtgctcgaaaggcaacgccttcttcggtggcgacaccgtcggctatgtggacgtcgccctcggcggcctgctcagctggctgcacgggaccgaggagctctgtggcacgaagatcctggatgcggcgaaaaccccgctcctgtccgcctgggcgcgccgcttcggcgaactggatgccgcgaacgccgccctcccggacgtgggccggctggtcgagttctgcaagatgcgccatgtggaactggaagccgccgaagccgccgcggcccgcaat

SEQ ID NO: 281 - protein, 220 aa, Artificial Sequence
  Description of Artificial Sequence: Synthetic polypeptide
MAAGGGGGDELKLLGLWASPYVLRAKFALSFKGLSYENVEEDLHNKSELLLSSNPVHKKVPVLIHNGKPICESQIIVEYVDEAFPDAGESLLPSDPYDRAVARFWAAYINDKFMPAWQKASLGLTEEEKAEAVKQMLAAIENLETAFKELSKGKPFFGGDTAGYLDVTLGAVVGWARAGEVLFGRKLFDATRSPLLAAWMERFVALDAVKAVLPDNAELI

SEQ ID NO: 282 - DNA, 660 bp, Artificial Sequence
  Description of Artificial Sequence: Synthetic polynucleotide
atggcggcgggcggcggtggcggggacgaactcaagctgctcggtctgtgggcgagcccgtatgtgctccgtgccaagttcgccctcagcttcaaaggcctgtcctacgagaacgtcgaagaggatctccataacaagtcggagctgctgctgagctcgaacccggtgcataagaaggtgccggtgctgatccacaacggcaagcccatctgcgaatcccagatcatcgtggagtacgtggacgaggcgttcccggacgccggggaatccctgctgccgtccgacccctacgaccgggccgtcgcgcggttctgggccgcctacatcaacgacaagttcatgccggcctggcaaaaggcgtcgctgggcctgaccgaggaggaaaaggcggaggccgtcaagcagatgctggccgccatcgagaacctggaaacggccttcaaggagctgtccaagggcaagcccttcttcggcggtgatacggcgggctacctggacgtcacgctcggtgccgtcgtcggttgggcccgcgccggggaagtcctgttcgggcgcaagctgttcgatgcgacccgcagcccgctgctggccgcgtggatggaacgcttcgtcgccctggatgcggtgaaagccgtgctgcccgacaatgccgagctcatc

SEQ ID NO: 283 - protein, 239 aa, Artificial Sequence
  Description of Artificial Sequence: Synthetic polypeptide
MAGGGDELKLLGMWASPFALRAKLALSFKGLSYDYVEEDFKNKSDLLLSSNPVHKKVPVLIHNGKPICESQVIVQYIDEVFPDAGVTLLPADPHDRAVARFWAAYIDEKLFSAWILVFRSKTEEEKAEAVKQTFAVVEKLEGALSECSKGKPFFGGDTVGYVDVVLGGFVAWVHAIEEVFGLNQFDAAKTPLLAAWLERFDELDAVKEVMPDIGRLVELAKMRQAQAAAAAAAAAGEAN

SEQ ID NO: 284 - DNA, 717 bp, Artificial Sequence
  Description of Artificial Sequence: Synthetic polynucleotide
atggcgggcggcggagacgaactcaagctgctgggaatgtgggcgtctccttttgccctgcgcgctaagctggccctgtctttcaagggtctgtcgtatgactacgtcgaggaggatttcaagaacaagagtgacctgctcctatcgtccaaccctgtgcacaagaaggtgccggtcctcatccacaacggcaagccgatttgtgagagtcaggtgatcgtgcagtacattgacgaagtgttcccggacgcgggcgtaacccttctcccggcggacccacatgatagagccgtcgcgcggttctgggcggcctatatcgatgagaagctattttccgcctggatactggtgttccgctcgaagaccgaagaagaaaaggccgaggccgtgaagcagactttcgccgtagttgagaaactggaaggcgcgcttagcgaatgttctaaaggcaagccgtttttcggcggcgacacagtgggctatgtggacgtggttctgggtggctttgtcgcctgggttcatgctatagaggaggtctttgggcttaatcagttcgacgccgccaagaccccgctgttggccgcgtggctggaacgcttcgatgaactggacgccgtgaaagaagtgatgcctgacattggtcgcctcgtcgaattggccaaaatgcgtcaggcacaagcagccgccgccgcggccgcagcagccggcgaggccaac

SEQ ID NO: 285 - protein, 208 aa, Artificial Sequence
  Description of Artificial Sequence: Synthetic polypeptide
MSRWTFYTAPGTCALATHIALQEAGAEFDVVKLDFGAGQQQSPEFLRVNPKGRVPALATEHGVLTETPALLAFVAQRFPAAGLAPLDDPFAFARLQELNSYLASTAHVAHAHKRRGARWADDPAAHEAMRAKVPETMTAVAAYLESQIAGPWALGERFSVADAYLYTIGSWLEGDGVDLARFPALTAYLARVAARPAVQRALAQAKAE

SEQ ID NO: 286 - DNA, 624 bp, Artificial Sequence
  Description of Artificial Sequence: Synthetic polynucleotide
atgagccgttggaccttctataccgcgcccgggacctgtgcgctggccacgcacatcgccctgcaggaggccggtgccgagttcgacgtcgtcaagctggacttcggtgcgggccagcagcaaagcccggagttcctccgcgtcaacccgaaagggcgcgtgcccgcgctcgccacggaacacggcgtgctgacggaaacgccggccctcctcgccttcgtggcccagcgtttccccgccgccggcctcgcgcccctggatgaccccttcgcgttcgcccggctgcaagaactgaacagctacctggccagcaccgcccacgtcgcccatgcccataagcgccgtggcgcccgctgggcggacgatccggcggcgcatgaagccatgcgtgccaaagtccccgagaccatgacggcggtcgccgcctacctggaaagccagatcgcggggccctgggcgctgggtgagcgcttcagcgtggcggacgcgtatctctacacgatcggcagctggctggagggggatggggtggacctggcccggttccccgccctgaccgcctatctggcgcgggtcgccgcccgcccggcggtccagcgggccctcgcccaggccaaggccgag

SEQ ID NO: 287 - protein, 256 aa, Artificial Sequence
  Description of Artificial Sequence: Synthetic polypeptide
MGIPDEKIHPVATGVAIKTVEKHQEPQELVFYSGWFCPFNQRTWISLEEKGIPYQYKEVNPYKKEKHFLDINPKGLVPAIEYRGKALYESIILCEFLEDAYPSHKPHLLPVDPFDRAHARIWIDHCTKTIVSATHRLLQSQDKESQDNAREELYAAQRKLAKEVKGPYFNGEEFGLVDICVAPWIARDYVVAEHRGYKREDASKEWKEYADRLSQRESVVKTMSEREHLNVIYDRYLRDEAQSEAAKATRAGREIP

SEQ ID NO: 288 - DNA, 768 bp, Artificial Sequence
  Description of Artificial Sequence: Synthetic polynucleotide
atgggcatccccgatgagaagatccatcccgtcgccaccggcgtggccatcaagaccgtggagaagcatcaggagccccaggagctggtgttctactcggggtggttctgtccgttcaaccagcgcacctggatcagcctggaggaaaagggcatcccgtaccagtacaaagaggtgaacccgtataagaaggagaagcacttcctggacatcaacccgaaggggctggtgcccgcgatcgagtaccgcggtaaggccctgtatgagtcgatcatcctctgcgagttcctggaagacgcgtacccgtcgcacaaaccccacctcctcccggtcgatccgttcgaccgcgcccacgcccgcatctggatcgatcattgcaccaaaaccatcgtctccgcgacccaccgcctcctgcaaagccaggataaagagtcccaggacaacgcccgcgaagaactctacgccgcgcagcgcaagctggcgaaggaggtcaagggcccctacttcaacggggaagagttcggcctggtcgacatctgcgtggcgccgtggatcgcccgtgactatgtggtggccgaacaccgcggttataagcgggaagacgcctccaaagaatggaaggagtacgcggaccggctgagccaacgcgagagcgtggtgaagacgatgtcggagcgcgagcatctgaatgtcatctacgaccggtatctccgggatgaggcccagtcggaagccgcgaaggcgacccgtgcgggtcgcgagatcccg

SEQ ID NO: 289 - protein, 222 aa, Artificial Sequence
  Description of Artificial Sequence: Synthetic polypeptide
MKFYDAQAPNPYAVRLFVLERGGLEFDVQTIDIMNLENRRLAYRSVNPRGEVPALDIDGFVLTEITAICEYLDEVAKGGKSLFGDTALERAETRMWLRRMDLELAQPIIAWYRNDPDTIDFYKGNRIPAPEARVVQKVTINQFLNLLDDQLEGKEYLCGSRFSAADIHFYGLLKMMVMQVAQWVLSPGRQNVAAYFERMDARKASQQALKPFGSKVYMDYPG

SEQ ID NO: 290 - DNA, 666 bp, Artificial Sequence
  Description of Artificial Sequence: Synthetic polynucleotide
atgaagttctatgacgcgcaggcgccgaacccgtacgcggtgcgcctgttcgtcctggaacgtggcggtctggagttcgacgtgcagaccatcgacatcatgaacctggaaaaccggcgtctggcctatcggagcgtgaacccgcgcggcgaggtgccggcgctggatatcgacggcttcgtcctgaccgagatcacggcgatctgcgaatacctggacgaggtggcgaaaggcggcaagtccctgttcggcgacaccgccctcgaacgcgccgaaacccgtatgtggctccgccgtatggatctggaactggcgcagccgatcatcgcgtggtaccggaacgaccccgatacgatcgatttctacaagggcaatcgcatccccgcgcccgaggcccgcgtggtgcagaaagtcaccatcaaccagttcctcaacctgctcgatgaccaactggagggcaaggagtacctctgtggctcgcgcttcagcgcggccgacatccacttctacggcctcctgaagatgatggtgatgcaggtcgcccagtgggtgctcagccccgggcgtcaaaatgtggccgcctacttcgaacggatggacgcgcgcaaagcctcccagcaagcgctgaagccgttcggctccaaggtgtatatggactacccgggg

SEQ ID NO: 291 - protein, 232 aa, Artificial Sequence
  Description of Artificial Sequence: Synthetic polypeptide
MAGGGDELKLLGMWASPFALRAKLALSFKGLSYDYVEEDFKNKSELLLSSNPVHKKVPVLIHNGKPICESQVIVQYIDEVFPDAGVTLLPADPHDRAVARFWASYIDEKLFGAWIPVFRGKTEEEKAEGVKQTFAVAEKLEGALSECCKGKPFFGGDTVGYVDVVLGGFVAWVHAIEEVFGLNQFDAAKTPLLAAWLERFDELDAAKEAMPDIGRLVELEKMRQAQAQAAVY

SEQ ID NO: 292 - DNA, 696 bp, Artificial Sequence
  Description of Artificial Sequence: Synthetic polynucleotide
atggcgggcggcggcgacgaactgaagctcctgggcatgtgggcgagtcccttcgccttgcgtgccaagctggcgctgtcgttcaaggggctgagttacgactacgtggaggaagacttcaagaacaagagcgagctgctcctgtcgagtaatccggtccataagaaggtgccggtcctgatccataatggcaagccgatctgcgagagccaggtcatcgtgcagtatatcgacgaagtctttccggacgccggtgtcaccctgttgccggccgacccccatgaccgcgccgtggcgcggttctgggcgtcctacatcgacgaaaagctgttcggcgcgtggattcccgtgttccgggggaaaaccgaagaggagaaggcggagggcgtcaagcagacctttgccgtcgcggagaaactggaaggcgccctctcggaatgctgcaagggcaaaccgttcttcggaggcgacaccgtgggctacgtagatgtggtgctgggcgggttcgtcgcgtgggtccacgcgatcgaggaggtgttcggtctcaaccaattcgatgcggccaagacgccgctgctggccgcctggttggaacgtttcgacgaactggacgccgcgaaggaagccatgccggacatcggccgtctggtagaactggagaagatgcggcaagcccaggcgcaagccgcggtgtac

SEQ ID NO: 293 - protein, 239 aa, Artificial Sequence
  Description of Artificial Sequence: Synthetic polypeptide
MAGGGEELKLLGMWASPFALRAKLALSFKGLSYDYVEEDFKNKSDVLLSSNPVHKKVPVLIHKGKPICESQVIVQYIDEVFPDAGVTLLPADPHDRAVARFWAAYIDEKLFSAWILVFRSKTEEEKAEAVKQTFAVVEKLEGALSECSKGKPFFGGDTVGYVDVVLGGFVAWVHAIEEVFGLNQFDAAKTPLLAAWLERFDELDAVKEVMPDIGRLVELAKMRQAQAAGAAAAAAGEAS

SEQ ID NO: 294 - DNA, 717 bp, Artificial Sequence
  Description of Artificial Sequence: Synthetic polynucleotide
atggccggtgggggcgaggaacttaagctgctgggcatgtgggcgtccccgtttgctctaagggcaaagctggccctgtcattcaaagggctcagttacgactatgtagaggaggacttcaagaacaagtcggacgtcctgttgtccagcaacccggtgcacaagaaggtgccggtgctgatacacaagggcaaaccgatttgtgagtcccaagtgatcgtccagtacatcgatgaagtcttcccggatgccggcgtgaccctcctgcccgcggacccgcatgaccgggcggtggcccgtttttgggccgcgtacatcgacgaaaagctcttcagcgcgtggatcttggtgttccgctccaagaccgaagaagagaaggcggaggccgtgaagcagacgttcgcggtcgtggaaaaattggagggcgcactgtcggagtgtagcaaaggcaagcccttcttcggaggtgacaccgtcggctatgtggatgtggtcctggggggcttcgtcgcttgggtccatgccatcgaggaagtcttcggccttaaccagttcgacgccgccaagaccccactgctcgccgcctggcttgaacgtttcgacgagctggacgctgtcaaagaggtgatgccggacattgggcggctggtcgagctggcgaagatgcgtcaagcgcaggccgccggagcggctgccgccgccgcaggtgaagcgagc

SEQ ID NO: 295 - protein, 243 aa, Artificial Sequence
  Description of Artificial Sequence: Synthetic polypeptide
MAAGGGGGDELKLLGLWASPYVLRAKFALSFKGLSYENVEEDLHNKSELLLSSNPVHKKVPVLIHNGKPICESQIIVEYVDEAFPDAGESLLPSDPYDRAVARFWAAYINDKFMPAWQKASLGLTEEEKAEAVKQMLAAIENLETAFKELSKGKPFFGGDTAGYLDVTLGAVVGWARAGEVLFGRKLFDATRSPLLAAWMERFVALDAVKAVLPDNAELIEYGKMRMAHYAKLAAALAAANKK

SEQ ID NO: 296 - DNA, 729 bp, Artificial Sequence
  Description of Artificial Sequence: Synthetic polynucleotide
atggcggccggcggtggtggaggggacgagctgaagctgctgggcctgtgggccagcccgtacgtactgagagctaagtttgcgctgagttttaaagggctgtcgtacgagaacgtcgaggaggacctgcacaacaaaagtgagttgctgctgtcgagcaacccggtgcacaagaaggtcccggttcttatccacaacggcaagccaatctgtgagtctcagatcatcgtggaatacgtggacgaagcgttccccgacgccggcgagagtctactcccatctgacccgtatgatcgggcagtggccagattttgggccgcgtacattaacgacaagtttatgccggcctggcaaaaggcgtcactgggcctgactgaagaagagaaggcagaggccgtcaagcaaatgttggccgccatcgagaacctggaaacggccttcaaggaactgagcaagggcaagccgttcttcggcggagacacggcaggttacctggacgttacacttggcgcagtcgtcggatgggcccgtgcgggtgaagtgctcttcggaaggaagctgttcgacgcgacccgatccccactgctggcggcctggatggagcgtttcgtagcgctggatgccgtgaaggctgtgctgcccgacaacgccgagctaatcgagtatggcaagatgaggatggcgcactatgccaaactcgccgcggccctcgcggctgccaacaagaag

SEQ ID NO: 297 - protein, 237 aa, Artificial Sequence
  Description of Artificial Sequence: Synthetic polypeptide
MAAEDELKLLGFWASPYVCRVKLALHLKGLIYDYVKEDVFTNKSELLLSCNPVHAKVPVLIHNGKPICESQVIVQYIDEVFPDAGVTLLPADPHDRAAARFWAAYIDDKLLPPWVHAYRGKTDEEKAERMKQTLAVVDALETAMEECSKGNAFFGGDTVGYVDVALGGLLSWLHGTEELCGAKILDAAKTPLLSAWARRFGELDAANAALPDVGRLVEFCKMRHVELEAAEAAAARN

SEQ ID NO: 298 - DNA, 711 bp, Artificial Sequence
  Description of Artificial Sequence: Synthetic polynucleotide
atggcggcggaagatgaactcaagctgctgggcttctgggccagcccgtacgtctgccgggtcaagctggcgctgcacctgaagggcctgatctacgactatgtgaaagaggacgtcttcaccaacaagtccgagctccttctgagttgcaaccccgtccatgctaaagtccccgtcctcatccataacggcaagccgatctgcgagtcccaggtgatcgtccagtacatcgacgaagtgtttccggacgcgggggtgaccctacttcctgcggacccgcatgatagagcggcagcgcgtttttgggcggcgtacatcgacgacaagctgctcccgccttgggtccatgcctaccgggggaagaccgacgaagagaaggcggaacgcatgaagcagaccctggcggtggtcgacgccctggagaccgccatggaagaatgcagcaaagggaatgcgttcttcggcggcgacacagtgggctatgtagacgtcgcgctgggcggattgctgtcctggcttcatggcaccgaggaactgtgcggcgccaagatcctggacgccgccaagaccccgttgctgtccgcgtgggccaggcgcttcggggaactggatgccgcaaacgccgcactccctgacgtaggacggctcgtcgagttctgtaagatgcgccacgtggagctggaagcagccgaggccgccgccgcgaggaac

SEQ ID NO: 299 - protein, 237 aa, Artificial Sequence
  Description of Artificial Sequence: Synthetic polypeptide
MATAGGGAGHLKLLGAWPSPFVNRVRMALHLKGLEYENVEEDLTNKSDLLLASNPVHKLVPVLLHGDKPISESLVIVEYLDDAFPGAGQAVLPADPYERAVARFWAKYVDGKLHGMMVKALMGATEEERATATVDALAAMDTLEGAFAECSGGKKFFAGDAPGYLDVALGGFIGWLRAWDKVGGVKLLDAGRVPRLATWAERFAALDVAKEVIPDPDHIAEFAKVLQARSAAAATSN

SEQ ID NO: 300 - DNA, 711 bp, Artificial Sequence
  Description of Artificial Sequence: Synthetic polynucleotide
atggccacggccggcggcggggcaggccatctcaagttgctgggcgcatggccctcccctttcgttaaccgcgtgcgcatggccctgcacttgaagggcctggaatacgagaacgtcgaggaagacctcaccaacaaatcagacctgcttctggcctcgaaccccgtccacaagctggtcccggtgctgctgcacggcgacaagcctatctccgagtccctggtcatcgtcgagtacctggatgacgcgttcccgggtgccggccaggccgtcttgccggccgacccctatgagcgtgccgtcgcgaggttctgggcgaagtacgtggacggcaagctgcatggcatgatggtcaaggcgttgatgggcgccacagaggaggagcgcgccaccgcgacggtagacgcgttggcggccatggacacacttgaaggcgcgttcgcggagtgcagcggcggcaagaagttcttcgccggcgacgccccgggctacctggatgtggccctgggcgggttcatcgggtggctccgtgcctgggataaggttggaggcgtcaagctcctggacgcgggccgtgtaccgcgactcgctacgtgggccgagcgattcgccgcgctggacgtcgccaaggaggtcatcccggacccggaccatattgccgagttcgccaaggtactgcaagcccgaagcgccgccgcggccacgagcaac

SEQ ID NO: 301 - protein, 234 aa, Artificial Sequence
  Description of Artificial Sequence: Synthetic polypeptide
MAGRVADKDPELKVLGVWSSPFVIRARVALNLKGLAYRYVEDNLDSKSELLLASNPVHGKVPVLLHDGRPVCESRVIVEYIDEAFPASGPCLLPADPYRRAVDRFWASYVDDKLFPTWIPVYNGRTSEDRVAAARQVVAVLEKFERAFDECSGGKAFFGGDAAGLVDVVLGGFLGWLRASEVMCGVRVIDPAKTPLLAAWADRFAALDGVREVIPDVQRLLEYNKIRRARRGLP

SEQ ID NO: 302 - DNA, 702 bp, Artificial Sequence
  Description of Artificial Sequence: Synthetic polynucleotide
atggccggcagggtcgctgacaaagacccggagctgaaggttctaggagtgtggtcctcgccgttcgtgattcgcgcccgcgtggcactgaacctgaaaggtctcgcctatcgctacgtcgaggacaacctggactccaagtcggaactcctgctcgcaagtaaccctgtccacggcaaagtgccagtcctgctgcatgacggtcgcccggtgtgcgagtcccgtgtcatcgtggaatatatcgacgaggcgttcccggcctctggaccctgcctgctccccgcggacccgtaccgtcgagcggtcgatcggttctgggcgagctatgtcgatgacaagctcttcccgacgtggattccggtgtataacggacgtacatcggaagaccgcgtcgcggctgccaggcaggtggtagccgtcctggaaaagtttgaacgcgccttcgacgaatgcagcgggggaaaagcgttcttcggcggggatgcggcgggcttggtcgatgtggttctgggtggcttcctaggctggctgcgtgcctcagaggtgatgtgtggcgtccgagtgatcgatccggccaagactcccctcctcgccgcctgggctgacagattcgccgcgctggatggggtccgagaagtcatcccagacgtccagcgcctcctggagtataacaaaatacggcgcgcccgccggggactccca

SEQ ID NO: 303 - protein, 228 aa, Artificial Sequence
  Description of Artificial Sequence: Synthetic polypeptide
MTAQLTLISHHLCPYVQRAAIALHEKGVPFERVDIDLANKPDWFLKISPLGKVPLLRISQDGGEAILFESTVICEYLEETQAGPKLHPADPLARARHRGWMEFGSAILSDLWVYETTQDGATLEAKRNVLKSKFATVEAELGSGPYFAGSAFSLVDAVFAPIFRYFDVFDTISDSGVFQGLPRVTAWREALAGRPSVKAAVGEDYPQRLMAFLEKHEAALLKTERVAA

SEQ ID NO: 304 - DNA, 684 bp, Artificial Sequence
  Description of Artificial Sequence: Synthetic polynucleotide
atgaccgctcaactgaccctgatctcgcaccacctctgcccttacgtccagcgcgccgcgatagccctccacgagaagggcgtccccttcgaacgtgtcgacatcgacctggccaacaagcccgactggttccttaagatctcgccgctaggcaaggtccctctgctcagaatctcccaggacgggggcgaggccatcttgttcgagagcaccgtcatctgtgaatacctggaagagacccaagctggcccgaagctccatcccgcagatccgctggcccgcgccagacatcgcgggtggatggagtttggctcggccattttgagcgacctgtgggtatacgaaacgacgcaggacggcgccaccctggaggcgaaacgcaatgtgctgaagtccaagttcgcgacggtcgaggccgagttgggcagtggaccgtacttcgccggctcggcgttctcgctggtagacgccgtcttcgccccgatcttccggtattttgacgtcttcgacaccatctccgacagtggggttttccagggcctccccagagttaccgcgtggcgtgaggccttggccggtcgtccgagcgtgaaggccgcagtcggcgaggactatccgcagcgcctcatggccttcctggagaagcatgaggcagcgctcctgaagaccgagcgtgtcgctgcg

SEQ ID NO: 305 - protein, 268 aa, Artificial Sequence
  Description of Artificial Sequence: Synthetic polypeptide
MSAVHPDANLFPHATGLAAEMVKQYSKEEPVKLYAGWFCPFTQRVLLLLLEKRIPFQYIEVNPYQKPLSLLKLNPRGLIPTLSYEGKALYESTIICEFLEDAYPSHYPRLLTREPFERARLKIWTDHITSRVVPAFNRFLQYQSVSLKDPRVLAIRNKFLTSLYEFTQEMHPIGPYFTGKEPCIVDYVLAPWALRIWIFDYFKGGLHIEELGELTGRWKKWLEAIEKRKSIQMTLSATEYYLPIYERYADSVPYVKIEKSREEEDGVF

SEQ ID NO: 306 - DNA, 804 bp, Artificial Sequence
  Description of Artificial Sequence: Synthetic polynucleotide
atgagtgccgtccatccggacgcgaatctattcccgcatgctacagggctggctgcggagatggtcaagcagtacagtaaggaagagccggtgaagctgtacgctggctggttctgcccgtttacgcagcgcgtgttgctgctgctgctggaaaagcgaatccctttccagtacatcgaggtcaacccgtatcaaaagccgctgtcactgctcaagctgaaccctcgcgggttgatacccaccctcagctacgagggcaaggcgctgtatgaatcaaccataatctgtgagttcctggaggacgcgtacccctcccattatccgagactcctcacgcgggagcctttcgaacgtgcgcggctgaaaatctggactgatcatatcacgtcacgcgtggtcccggcgttcaaccggttcctccagtaccagtcggtgagcctgaaagatccgcgggtccttgccatccggaacaagttcctgaccagcctgtacgagttcacccaggagatgcacccgatcggtccatatttcaccggcaaggagccctgcatcgtcgactacgtcctggctccctgggcgttgaggatctggatcttcgattacttcaagggaggtctccatatcgaagagctgggtgagctgaccggccgctggaagaagtggcttgaggcaatcgagaagcgcaagagtatccagatgaccctctccgcgacagaatactatctcccgatatacgaacggtacgccgactcggtgccctacgtgaagatcgagaagagccgggaggaggaggacggcgtgttc

SEQ ID NO: 307 - protein, 180 aa, Artificial Sequence
  Description of Artificial Sequence: Synthetic polypeptide
PKSLLDLNPRGLVPTLQYQNKPLFESTVLCEFLEDAYPDHTPHLLPKDPYDRARTRIWTDYVGSRIIPAYHRFLQHQGEEGLKDKQQEFLNHLKEFTKEMDPEGPFFMGQEFSLIDIVIAPWANRLWVFDHFKGGSGLPEEGKGGEDEEVWKRWRKWLSAVENRKSVKETLSEQRGGEGD

SEQ ID NO: 308 - DNA, 540 bp, Artificial Sequence
  Description of Artificial Sequence: Synthetic polynucleotide
ccgaaatccctcctcgatctgaacccgcgtggcctggtgccaaccttgcagtaccagaacaagccgctgttcgagagtaccgtcctgtgtgagttcttggaagacgcttatcccgaccacacgccgcatctgctgccaaaggacccctacgaccgtgcccgcactcgcatttggacagactatgtgggctccaggataatccctgcatatcatcggttcctgcaacaccaaggcgaggaggggcttaaggacaagcaacaggagttcctgaaccacctgaaggagttcaccaaagagatggaccctgagggcccgttcttcatgggtcaggagttctcgctgattgacatcgtgatcgctccgtgggccaaccggctgtgggtattcgatcacttcaaaggcggcagtggcctaccggaagaagggaaaggtggcgaggatgaagaggtttggaagcgctggcgcaagtggcttagcgcggtagagaaccgcaagtcagtgaaggagaccctctctgaacagcgcggcggtgaaggggat

SEQ ID NO: 309 - protein, 217 aa, Artificial Sequence
  Description of Artificial Sequence: Synthetic polypeptide
MVLKLYGAPMSTCTSRVLTCLHEKNLDFELVPVDLFAGEHKQPPFLAKNPFGQIPALEEDDLTLFESRAITSYIAEKFKGTGYDLIRHENLKEAASVKVWTEVESHRYNPAIAPIVFQFMVAPLRGNSPDQTIIDDNVEKLGKVLDIYEAKLSSTKYLAGDFYSLADLHHLPYTYYLMKTPAASVVNERPHVKAWWEDISSRPAFKKVAEGMNFVKK

SEQ ID NO: 310 - DNA, 651 bp, Artificial Sequence
  Description of Artificial Sequence: Synthetic polynucleotide
atggtattgaagctgtatggcgcgccgatgagcacttgcaccagccgagtcctgacctgtctgcatgaaaagaacctggacttcgaactggtcccggtcgacctgttcgccggtgagcataagcaaccgccgtttctggcaaagaacccgttcgggcagattcctgcactggaggaagatgacctcactctcttcgagtcgagagcgatcacctcctatatcgccgaaaagttcaagggcacagggtacgacctgatccggcacgagaacctgaaggaagccgcctcggtcaaggtctggacagaagtcgaatctcacagatacaaccccgcgatcgcaccgatcgtgttccagttcatggtcgccccgctgcgtggtaattctccggaccagaccatcatcgacgataacgtcgagaagctgggaaaggtgctggatatttacgaggctaagctgtcctcgacgaagtatctggcgggcgacttctattccctcgctgatctgcaccacctgccctacacctactatcttatgaagacgcccgccgcttccgtagtgaacgaacgtccccatgtcaaggcctggtgggaagatatctcgtcgcggccggccttcaaaaaggtcgccgagggtatgaacttcgtgaagaag

SEQ ID NO: 311 - protein, 241 aa, Artificial Sequence
  Description of Artificial Sequence: Synthetic polypeptide
MATTAGAGGAGKLKLLGAWPSPFVNRVRVALHLKGLEYENVEEDLTNKSDQLLASNPVHKKVPVLLHGDTPVSESLVIVEYLDDAFPGAGQALLPADPYERAVARFWAAYVDGKLHGMMVKAILGATEEERAAATADALAAMETLEGAFAECSGGKEFFAGDEPGYLDVVLGGFIGWLRAWDKVGGVKLLDGGRRTPRLAAWAERFAALDVARDVIPDPDHIAEFAKVLQARSAAAAAAGN

SEQ ID NO: 312 - DNA, 723 bp, Artificial Sequence
  Description of Artificial Sequence: Synthetic polynucleotide
atggccaccaccgcgggcgccgggggcgccggcaaactgaagctcctgggcgcctggccgtcgcccttcgtgaatcgcgtccgtgtcgctctgcacctaaagggccttgaatacgaaaacgtggaggaggatctgaccaacaagtccgatcagctgttggcgtctaaccctgtgcataaaaaggtcccggtgctgctgcacggcgatacgcctgtctccgagtcgctggtcatagtagagtacctcgacgacgccttcccaggtgccggccaggccctgcttcccgccgatccctacgaacgcgccgtcgcgcgattttgggcggcctacgtcgacggcaaactccatggcatgatggtcaaagccatcctgggtgcgaccgaggaagaacgtgcagcggctactgccgacgcgctagcggcgatggaaacccttgagggtgcattcgccgagtgttccggcggcaaggagttcttcgccggggacgagcctggctacctggacgtcgtgctgggcggctttataggctggctgcgcgcctgggacaaggtgggcggcgttaagctgctcgacggtggtcgccgaaccccgcggctggccgcctgggcggaacgctttgccgcactcgatgtggcgagagacgtcatccctgatccggaccatatcgcggaatttgccaaggttctgcaggcccgcagcgcagcggctgccgcggcgggcaac

SEQ ID NO: 313 - protein, 239 aa, Artificial Sequence
  Description of Artificial Sequence: Synthetic polypeptide
MSSAGNELKLLSTWFSPFGSRVKLALHLKGLSYEYVEEDLMNKSQLLLQSNPVHKKVPVLFHRGKALCESMVIVDYIEEAFPDAGPRLLPSDPYERAVARFWVAFIENKFVAPWCQMFDVTKTREEKAEGLKQILAARATMEGALEEYSKQGKPFFGGDSVGCVDIALGGLLVWVRASEVLSGVKLLDAATAPLLSAWAERFAALDAAKAALPDFGRVLEYATKMRGPAAAKAVAVLNK

SEQ ID NO: 314 - DNA, 717 bp, Artificial Sequence
  Description of Artificial Sequence: Synthetic polynucleotide
atgtcgtccgccgggaatgagctgaagctgctgtcgacgtggttcagcccgttcgggagccgcgtgaagctggccctccacctgaaggggctgtcgtacgagtacgtcgaggaagacctgatgaataagtcgcagctgctgctgcagtccaatccggtgcacaagaaggtgcccgtcctgttccatcgcgggaaagcgctgtgcgaatccatggtgatcgtggactacatcgaggaggccttcccggatgcggggccgcggctgctgccgagcgatccgtacgagcgggccgtggcccggttctgggtggcgttcatcgagaacaaattcgtcgcgccgtggtgccagatgttcgacgtcaccaagacccgcgaggagaaggcggagggcctgaagcaaatcctggccgcccgcgccaccatggagggcgccctggaggaatacagcaagcagggcaaaccgttcttcggcggcgactcggtcggctgcgtggacatcgcgctgggcggcctgctcgtctgggtccgggccagcgaggtgctgagcggtgtgaagctcctcgatgccgcgaccgcgccgctcctgagcgcgtgggccgagcggttcgccgcgctcgatgcggccaaggcggccctgcccgacttcggtcgcgtgctggagtacgcgacgaagatgcgtggtcccgccgccgccaaagcggtcgccgtcctgaacaag

SEQ ID NO: 315 - protein, 290 aa, Artificial Sequence
  Description of Artificial Sequence: Synthetic polypeptide
MSSTTNLTLYVAGASYYSVRVEVALAEKGINYDRCTINGFICENLEPWYMKMNPTGKVPTLMHGDKPVCGSAAILKYLDDEFPETVSLYPDKQSPLYDQIKQFEELVDSYFLGTLVGGCYKYPKYVPKFGLWDHNCCKNIWMVGHKIIPSRAAENARKHPELTELYERKKDNIVEYDPTEEVFKDVLEKVKNIVDTAEEKFQDRADKGEKVEYFMTDNFSSADIYLVVFLKKVGAIGFSSYWEDGKHPFVTEYFKRLKQRPSVKEVFKVYDADIQKISEFQIKGLFAGKL

SEQ ID NO: 316 - DNA, 870 bp, Artificial Sequence
  Description of Artificial Sequence: Synthetic polynucleotide
atgagctcgaccaccaacctcaccctctacgtggccggcgcctcctattactccgtccgcgtcgaagtcgccctcgccgagaaaggcatcaactacgaccgctgcacgatcaacggcttcatctgcgagaacctcgaaccctggtacatgaagatgaatccgaccggtaaggtccccaccctcatgcacggtgacaagccggtctgtgggagcgcggcgatcctgaaatatctggacgatgagttccccgagaccgtcagcctgtacccggacaagcaaagcccgctctacgaccagatcaagcaattcgaagaactggtggacagctacttcctggggaccctggtgggcggctgttacaagtacccgaagtacgtgcccaagttcggcctctgggaccataactgctgcaagaacatctggatggtgggccataagatcatcccgtcccgggcggccgagaatgcgcgcaagcatccggaactgaccgaactgtacgagcgcaagaaggataacatcgtcgagtacgatccgacggaggaagtgttcaaggacgtgctggagaaggtgaagaacatcgtggacacggcggaggaaaagttccaggaccgcgcggacaagggtgaaaaggtcgagtacttcatgaccgacaacttctcctccgccgacatctatctggtcgtcttcctcaagaaggtgggggcgatcgggttctcctcctattgggaggacggcaaacatccgttcgtcaccgagtacttcaagcggctcaagcaacgcccgagcgtgaaggaagtcttcaaggtctacgacgcggacatccagaagatcagcgagttccagatcaagggtctcttcgccgggaagctg

SEQ ID NO: 317 - protein, 283 aa, Artificial Sequence
  Description of Artificial Sequence: Synthetic polypeptide
MSGEGNMKLYVFKASYYAYRVMIGLAEKGLKYDYIVVNPFTGENVAPWYMKMNPTGKVPTLVHGDKPVCGSAAILKYLEEEFPETSAIYPDKKSPLYEQITQFEDLVDCYYIGTLVGGSYRYPKYVPEVKNQNAWKNIWIVGHNIIPTRAAENAIKHPELADLYDKKKVNIVEYDPTEEVFKDVLEKVKNIVDTAEEKFQERADKGEKVEYFMTDNFSSADIYLMVFLKKMGLVGFSSYWEDGKHPFVTEYFKRLEQRPSVKEMFKIYDDEVRQMCDLQIEGF

SEQ ID NO: 318 - DNA, 849 bp, Artificial Sequence
  Description of Artificial Sequence: Synthetic polynucleotide
atgtccggcgagggcaacatgaagctgtacgtgttcaaggcctcgtactacgcgtaccgcgtcatgatcgggctcgcggagaagggcctcaagtatgactacatcgtggtcaacccgttcacgggtgaaaatgtcgccccgtggtacatgaagatgaacccgaccggtaaagtgcccaccctggtccatggtgacaagccggtgtgtggcagcgcggccatcctcaagtacctggaagaggagttcccggaaaccagcgccatctacccggacaaaaagagcccgctgtacgaacagatcacgcagttcgaggacctcgtggattgctactacatcgggacgctcgtgggcggctcgtaccggtaccccaagtacgtgcccgaggtgaaaaaccagaatgcgtggaagaacatctggatcgtgggccacaacatcatccccacccgcgccgccgaaaacgcgatcaagcatcccgagctggcggacctgtatgacaagaagaaggtgaatatcgtcgagtacgacccgaccgaggaagtcttcaaggacgtcctggagaaggtgaagaacatcgtcgataccgccgaagagaagttccaggagcgtgcggacaaaggcgagaaggtggaatatttcatgaccgacaacttcagcagcgccgacatctacctcatggtgttcctgaagaagatgggcctggtgggtttctcctcgtactgggaagacggcaagcacccgttcgtcacggaatatttcaagcgcctggagcagcgtccgagcgtgaaggagatgttcaagatctacgatgacgaggtccgccaaatgtgtgacctccaaatcgaaggcttc

SEQ ID NO: 319 - protein, 590 aa, Artificial Sequence
  Description of Artificial Sequence: Synthetic polypeptide
MGSLFSKSNEDDDPKQKYRLRDGITLYDAGASPCGRRVRMTLLEKGRQWNTVEVDLLNAEQKTAEYLKINPNGKVPAIIVHNVDDIPDCCLFESNVITEFLDTVLPGNKLYPNDPWEKAQCQRWQEWEVSLTDDFVPFMYHNLFSFVIRATQPSSDSALRGKDCSQHLRDKYEKMYHGTYQSPIEMEQRAIACYENLLILEEEMEGKDFLVGEQFTIADLSVFPRVQMFDIMGLPITKQHFPNVSRYINKLAKRECFQKSVSLKTRILDLVIRYLSPLLVAIGNWRSGKRHQRFNGMTVINRVLSNRKSCTKEKITSIPATEKFVLYEYSTAAESLIMKILLKEKGDTSYTTVSCDFIDLIGRPNGSGGLFRLQHNDRLVTGIKTMLEYVNTVATGKSLYPSDPVLKAECQCWQAWDQTLNWIEFSILLETDMVSLKLHERFTEKNIEELLNLKSNMKYHAKFENIMALYMSRLSKTSPVWHILSAEFGHLIVSTENKMKMTAMYHDLMNTRLRFLESHLKNKMYLVGSDMTIADITVFCRLLFFPLASLPVRSEEYPNIASWMLRLRQREAFRGEVENFEKEMNKYIQF

SEQ ID NO: 320 - DNA, 1770 bp, Artificial Sequence
  Description of Artificial Sequence: Synthetic polynucleotide
atgggctcgctgttcagcaagagcaacgaagacgacgaccccaagcagaagtaccggctccgcgacggcatcaccctgtatgacgccggggcgtccccctgcggtcggcgcgtccgcatgaccctgctggaaaagggccgccagtggaacacggtcgaggtggacctgctgaacgccgaacagaagacggcggagtacctgaagatcaacccgaacggcaaggtgccggcgatcatcgtgcataacgtggacgacatccccgattgctgcctgttcgaaagcaacgtgatcaccgagttcctggacaccgtgctgccgggcaacaagctgtaccccaacgacccgtgggaaaaagcccaatgccagcggtggcaggagtgggaagtgagcctgaccgacgacttcgtgccgttcatgtaccataacctgttcagcttcgtcatccgggccacccagccgagctccgacagcgcgctgcggggcaaggactgctcgcagcatctccgcgacaagtacgagaagatgtaccacgggacctaccagtccccgatcgagatggagcagcgtgccatcgcctgctatgagaacctgctgatcctcgaagaggagatggaaggcaaggacttcctggtcggggagcagttcacgatcgccgatctgtcggtgttcccgcgcgtccagatgttcgatatcatgggcctccccatcaccaaacagcacttcccgaacgtcagccgttacatcaacaagctggccaaacgcgaatgcttccaaaagagcgtgagcctcaagacccgcatcctcgatctggtcatccgctacctcagcccgctcctcgtggccatcggcaactggcgctcgggtaagcgccaccagcgtttcaacggcatgaccgtcatcaaccgggtgctgtccaaccggaagtcctgcaccaaggagaagatcacctccatccccgccaccgagaagttcgtgctgtacgagtactcgacggcggccgagtccctcatcatgaagatcctgctcaaggaaaagggtgacaccagctacaccacggtctcgtgcgatttcatcgacctcatcggccgcccgaacggcagcggcggcctgttccgcctccaacacaacgatcgcctggtgacgggcatcaagaccatgctggagtacgtcaacaccgtcgccacgggcaagtcgctgtatccctccgacccggtcctgaaagcggagtgccagtgctggcaggcctgggatcagacgctgaactggatcgagttcagcatcctgctggaaaccgacatggtgtccctgaagctgcacgagcgcttcaccgagaagaacatcgaggaactgctgaatctcaagtccaacatgaagtatcacgccaagttcgagaacatcatggccctgtacatgagccgcctgagcaaaacctcgcccgtctggcacatcctcagcgcggagttcggccatctgatcgtcagcaccgagaacaagatgaagatgaccgccatgtatcacgacctgatgaatacccgcctgcgcttcctggaatcccacctcaagaacaagatgtacctcgtggggagcgacatgaccatcgccgacatcacggtgttctgccgtctgctgttcttcccgctcgccagcctgccggtgcgcagcgaagaatatccgaacatcgcgtcgtggatgctgcgtctgcggcagcgcgaggccttccgcggcgaggtggaaaacttcgagaaggagatgaacaagtacatccaattc

SEQ ID NO: 321 - protein, 215 aa, Artificial Sequence
  Description of Artificial Sequence: Synthetic polypeptide
MAIKIYGIPMSTCTGRVLYTLKEKSLDYELVPVNMAAGEHKDPQFLAKQPFGQIPVLENKGLTLFESRAISRYICDLSPKGEPLYGKTPEDRALVEQWLEVESQNFNPPISTIVFQLVFSKFRGLTPDQEVVESNLKKLDSVLAIYESHLASQDYLAGSFFSLADLSHVPYLHYLINVAKKGDVVTSKKNVSAWWEKISSRPAWQEVVAAAAAAP

SEQ ID NO: 322 - DNA, 645 bp, Artificial Sequence
  Description of Artificial Sequence: Synthetic polynucleotide
atggcgatcaagatctacggcattccgatgagcacgtgtaccgggcgcgtgctgtacaccctgaaggagaagtcgctcgactacgaactggtgccagtcaacatggcggcaggtgagcataaggacccgcagttcctcgccaagcagccctttggccagatcccggtgctggaaaataagggcctgactctgttcgagtcccgggcgatctcgcgctatatttgcgatctgagcccgaagggtgagccgctctacgggaagacccctgaggatcgcgccctggtggagcaatggctggaggtcgagagccagaatttcaacccgccgatcagcaccatcgtcttccagctcgtgttctccaagttccggggactgacgcccgaccaggaagtggtcgagagcaatctcaagaagctggattcggtactggccatctatgaatcccacctggcctcccaggactatctcgctgggtccttctttagcctggccgacctctcgcacgtaccctacctccactatctgatcaacgtggcgaagaaaggcgatgtcgtgacgtccaagaagaacgtcagtgcctggtgggagaaaatcagtagccgccccgcctggcaggaagtagttgctgccgccgctgccgctccc

SEQ ID NO: 323 - protein, 280 aa, Artificial Sequence
  Description of Artificial Sequence: Synthetic polypeptide
MFNPLLIWILCLSSVNIAVVSKLVGFTSKILQQDDPEPSPGDNIRIYSMRFCPYCDRVIIAAYKKGLQFEVLNINLQNKPGWFLSKHPEGTVPVLEHDGKLVSDSRVIIEYLDDAFPETSILPKEPYLRAKQRYYAIKLESVCNTIHKVSYLTKLSGNITILAIELAKAEELLQSPFYSDTAVGLPDIMLYPFIQRLHVIRQFVKDNFLDDYFPNNFPKLVKWFVKMRTMPEIQIVRESERHLKAFLISKAKQNATDFDVDLSHPNTPINWKFFNNSTIQ

SEQ ID NO: 324 - DNA, 840 bp, Artificial Sequence
  Description of Artificial Sequence: Synthetic polynucleotide
atgttcaatccgctgctgatctggatcttgtgcctctccagcgtgaacatcgcggtcgtctcgaagctggtggggttcacgagtaagatcctgcaacaggacgatcctgaacccagcccgggagacaacatccgcatctattcgatgcgcttctgcccgtattgcgaccgtgttatcatcgctgcgtacaagaagggcctgcaattcgaagtcctgaacatcaacctgcagaataagccgggctggttcctgagtaagcaccccgagggcaccgtacctgtcctggaacatgacggcaaactggtgtcggactcgcgtgtcatcatcgagtacttggatgacgccttcccagaaacctccatcctgcccaaggagccttacctgcgtgccaagcagcggtattacgccattaagctggaaagcgtctgtaacaccatccataaggtgagctacctgacgaagctgtccggaaacatcaccatcctcgccatcgagctcgctaaggcggaggaactgctgcagagtccgttctactccgacacggcggttgggctgcctgatattatgctctatccattcatccaacgcctgcacgtcatccggcagttcgtgaaggacaacttcctcgatgactacttcccgaacaacttccccaagctggtgaagtggttcgtgaagatgcgcaccatgccggagatccagatcgtacgcgaaagcgaacgccacctgaaggcctttctcatcagcaaggctaaacagaatgccaccgacttcgatgtggacctgtcccacccgaacaccccgatcaactggaagttcttcaacaacagcaccatccag

SEQ ID NO: 325 - protein, 220 aa, Artificial Sequence
  Description of Artificial Sequence: Synthetic polypeptide
MSLTVYGAPLSPFVRKVRLCLIEKGLDYELEVVMPFAQPDWYRELNPLGRIPAFRDGDLKLADSSVICQYLEERYPEHKPLYGEDAQQRARVRWLEKYADYELAPLCTFTVFRNRVLKATMGQPCDEENVQQALKDKLPSHFDYFETTLGDAPYFLGEKPSMADLALASQLINMEHGGETLDAERWPNLVAHYQRIKARPSMQEILPRELRTLEKIGVKR

SEQ ID NO: 326 - DNA, 660 bp, Artificial Sequence
  Description of Artificial Sequence: Synthetic polynucleotide
atgtcgctcactgtctatggcgcaccgctgagcccgttcgtgcgcaaggtacgcctctgcctcatcgagaagggtctggactacgagctggaagtggtgatgcccttcgcccaacctgactggtaccgcgaactgaacccgttgggacggattccggcctttcgcgacggcgacctcaagctggccgattcctcggtgatctgccagtacctggaagaacgctatccggagcacaagccgctgtacggagaagacgcgcagcagcgcgcccgtgttcgttggctggagaaatacgctgattacgagctggcgcccctctgcacctttactgttttccgcaatcgcgtgttgaaggcgacgatgggccagccgtgcgatgaagaaaacgtgcaacaggcgctgaaggacaagctgccctcccatttcgactatttcgagacgaccctgggcgatgccccgtacttcctcggggaaaaaccgtcgatggcggacttggccctggcctcccagctcattaacatggaacatggcggcgagactctggacgcggagcgttggccaaatctggtcgcgcactaccagcggatcaaggcccgcccgagtatgcaggaaatcctgccgcgcgagctccgcaccctggagaagattggtgttaagcgc

SEQ ID NO: 327 - protein, 234 aa, Artificial Sequence
  Description of Artificial Sequence: Synthetic polypeptide
MSDLSSFPITKRWPAQHSDRIQLYSLPTPNGVKVSIMLEETGLPYEPHAIDFGKDHQKTPEFLSLNPNGKIPAIIDPNGPGDKPLGLFESGAILQYLAEKTGQFLPADPARRWQTLQWLHFQMGGIGPMFGQLGFFHKFAGREYEDKRPLQRYVAESKRLLGVLEARLDGRQWIMDADYTIADIATLGWVRNLIGFYGARELVAFDELTHVPAWLERGLARPAVQRGLEIPKRP

SEQ ID NO: 328 - DNA, 702 bp, Artificial Sequence
  Description of Artificial Sequence: Synthetic polynucleotide
atgagtgacctgagctccttcccgatcaccaagcgctggcctgcacagcactcggaccgcatccaactgtacagtctgccgacgccgaacggcgtcaaagtctcgatcatgctggaggaaacgggtctgccgtatgagccgcacgctatcgacttcgggaaggaccaccagaagaccccggagttcctgtccctcaacccgaacggcaaaatccccgccatcatcgacccaaatggcccgggggataagccactgggcctcttcgagagcggcgcgatcctgcaatacttggccgaaaagacgggtcagttcctcccggccgatccggcccggcggtggcaaaccctccaatggctgcatttccagatgggcggtatcggcccgatgttcggacagttgggcttcttccacaagttcgccggccgcgagtatgaagacaagcgccctctccagcggtacgtagcggaatcgaaacgcctgctgggcgtgctggaagcccgcctcgatggacgtcagtggatcatggatgcggactataccatcgctgatatcgccacgctcggctgggtccgcaacctgatcggcttctacggggcgcgcgaactcgtagccttcgacgaactgactcacgtcccggcgtggctggagcgcggactggcacggcctgcagtccagcgcgggctggagatccccaagcgtccc

SEQ ID NO: 329 - protein, 202 aa, Artificial Sequence
  Description of Artificial Sequence: Synthetic polypeptide
MKLHTNRTGANCRRVAIYLAEKGLAIEAVHLDLSSGELKTPAFRAINPAGLVPVLELDDGSYLPESTAIIEYLEELHPEPCLIGTTPRHRAHVRAIERIASDLGVLTIAAMQHTHPYFAARLKQEPSVGAALQGLVDQHLTTLERHIGDFPFLAGERLTIADIVLFPLFQTCRERMGIPFGAEQPRLSAWYDRFAKRPSAQY

SEQ ID NO: 330 - DNA, 606 bp, Artificial Sequence
  Description of Artificial Sequence: Synthetic polynucleotide
atgaaactgcacaccaatcgtactggggccaattgtcggcgggtcgcaatctacctggcggagaagggtctggcgattgaagccgtccatctggacctgtcgagtggtgagctcaaaacccccgccttccgtgctatcaatccggctggcctggtcccagtgctggaactcgacgacggcagttacctgccggagagcactgccatcatcgagtacctggaagagctgcatccggaaccctgcctgatcggaaccaccccgcgccatcgggcccacgttcgtgcgattgagcggatcgcgagtgacctgggtgtgctgactatcgccgccatgcagcatacgcacccgtacttcgcggcgcgcctcaagcaggaaccgagtgttggcgcggcactgcagggactggttgaccagcacctgacgaccctggagcggcatatcggggactttccctttctcgccggtgaacgcctcacgatcgcggacatcgtcctgttccctctgttccaaacgtgccgcgaacgtatgggcatcccgttcggcgcagagcagccgcgcctctcggcttggtacgaccggttcgccaaacggccaagcgcccagtac

SEQ ID NO: 331 - protein, 228 aa, Artificial Sequence
  Description of Artificial Sequence: Synthetic polypeptide
MSSSADERKGSATMTIQLYAHPFSSYCQKAKTALYEKGIAFEEKMLDGSEPNAGEFAALWPVGKFPVAVDDGQLVFEATGIIEHVEARFPDAPRLIPADPLAAAEVRMWDRFFDNYVAYPQQRLVYIAIGREHDDGGDRWRAALDTAYALLNERMRDREWVAGDFGLADCSAAPQLLYADWSHAIPETYAALRAYRARLLARPSYARALDEARPYRHFFPLGAPEGRD

SEQ ID NO: 332 - DNA, 684 bp, Artificial Sequence
  Description of Artificial Sequence: Synthetic polynucleotide
atgtcgagctcggctgacgaacgcaaaggatcggccacgatgaccatccagctgtacgcgcaccctttttccagctactgccaaaaggcgaagacggccctctacgagaagggcatcgccttcgaggagaagatgctggacggcagcgaacccaatgcgggagagttcgccgccctctggccggtaggaaaattcccggtcgcggttgacgacgggcagctggtcttcgaagccacgggcatcatcgagcatgtggaagcccggttcccggatgccccgcgcctgatcccggcagacccgctcgccgccgctgaagtgcgcatgtgggaccgcttcttcgacaactacgtggcctacccacagcagcgcctggtttacattgcaatcggccgcgaacatgacgacggcggcgaccgctggcgggcagccctcgacaccgcctatgctctcctgaatgaacgcatgcgcgaccgtgaatgggtggcgggcgacttcggactggccgattgttccgcggccccgcagctcctctatgccgattggagccacgccatccccgagacctacgccgccctccgcgcctaccgcgcacgtctcctggcgcgtccgtcgtatgcccgtgcgctggatgaagcgcgtccgtaccgccatttctttccgctgggcgccccggaagggcgcgat

SEQ ID NO: 333 - protein, 205 aa, Artificial Sequence
  Description of Artificial Sequence: Synthetic polypeptide
MKLYNSIGPNPRVVKMFMHEKGIELPLAEVDLMKGENRQEPYLAKNPAGQLPALELDNGMILAEITAICEYLDEKFPGGSLIGTTPEERAETRMWTRRVDLNVCEPMANGFRFSEGLPLFKDRMRCLPEAAAGMKAIAQDKLAWLDKLMAGKDYLAGKRMTLADILLFGFLDFGAAVGQPINPDFKNITAWFDRMKGRASAAASA

SEQ ID NO: 334 - DNA, 615 bp, Artificial Sequence
  Description of Artificial Sequence: Synthetic polynucleotide
atgaaactgtacaacagcatcggcccgaacccgcgcgtcgtcaagatgttcatgcatgagaagggcatcgagctgccgctcgccgaggtggacctgatgaaaggcgaaaaccgccaggagccctatctggcgaaaaacccggccggtcaactgccggcgctggaactggacaacggcatgatcctggccgaaatcaccgcgatctgcgagtacctcgacgaaaagttccccggtggttccctgatcggcaccacgccggaagagcgtgccgagacccgcatgtggacgcgccgggtcgacctgaacgtctgcgaaccgatggcgaacggcttccgtttctcggagggcctgccgctcttcaaggaccgcatgcgttgcctgcccgaagccgccgcgggcatgaaggccatcgcccaagacaagctggcctggctggacaagctgatggccggcaaggactacctcgcgggcaagcgtatgaccctggccgacatcctgctcttcgggttcctggacttcggcgccgccgtggggcaacccatcaaccccgatttcaagaacatcaccgcctggttcgatcgcatgaagggccgcgcgtccgccgcggcctccgcc

SEQ ID NO: 335 - protein, 217 aa, Artificial Sequence
  Description of Artificial Sequence: Synthetic polypeptide
MTLRLHNFFRNSAGHRVRIALALKGLDYEYVSVNIGPAGEQKSDAYLKLNPQGLVPTLEHDARILTQSLAIIEYLEEVFPEPSIMPADLLTRAQARAFAAAIAAEMHALNNSGVHRYLGGEMGLDDAKRQQWYAHWGTIGFTALEKTLASRPETPFCFGDKPTIADIFLVPQHLNYVRFKVDLEPYPRINRIVAHCGSLPAFKAAAPDAQPDYVEGL

SEQ ID NO: 336 - DNA, 651 bp, Artificial Sequence
  Description of Artificial Sequence: Synthetic polynucleotide
atgaccctgcgcctgcataacttcttccggaactccgcgggtcatcgcgtgcgcatcgcgctggccctgaagggtctggactacgagtacgtctccgtgaacatcggcccggcgggggagcaaaagtccgacgcgtacctgaagctcaacccgcagggtctggtcccgaccctggaacacgacgcccgtatcctcacccagtcgctggcgatcatcgagtacctggaggaggtcttcccggaaccgtcgatcatgccggccgacctgctgacccgcgcgcaagcccgtgcgttcgccgcggccatcgcggccgaaatgcatgccctgaacaacagcggcgtccatcgctacctgggcggcgaaatggggctggacgacgccaagcgccagcagtggtacgcccattggggcaccatcgggttcaccgcgctggagaaaaccctggccagccgtcccgagacgccgttctgtttcggcgacaagccgaccatcgccgacatcttcctggtcccccagcacctgaactacgtgcgcttcaaggtggatctggagccgtatccgcgcatcaaccggatcgtcgcccactgcggcagcctgccggccttcaaagccgccgccccggacgcccagccggactatgtcgagggtctg

SEQ ID NO: 337 - protein, 217 aa, Artificial Sequence
  Description of Artificial Sequence: Synthetic polypeptide
MPSKTSLKLYFAPGSSAFAPLIALEELGVAYAVHRIDLAAGEQREPAYLKVNPRGRVPTLAVNGEPVTEVLAILTYLAHAYPHSELLPLADPLKLAHAYEVMSWFASTVHVAFSQIARPERFADDDTVKAALATPGEARFARTLSDIERLAQGPGPWLLGESFSAVDAYALVIWRWAERRAIDTSAYPAWSAKAARALARPSVRRALQKESSAKVAA

SEQ ID NO: 338 - DNA, 651 bp, Artificial Sequence
  Description of Artificial Sequence: Synthetic polynucleotide
atgccgtccaaaacctccctgaagctgtatttcgcccccggtagctcggccttcgccccgctgatcgccctcgaagagctgggcgtggcgtacgcggtccatcgcatcgatctggccgcgggggaacagcgtgagccggcctatctgaaggtgaacccgcgcggtcgcgtgcccacgctggcggtgaatggcgaaccggtgaccgaggtcctggccatcctgacctacctggcgcatgcgtatccgcacagcgagctcctgcccctggccgaccccctgaagctggcgcatgcctacgaggtgatgtcgtggttcgcgtcgaccgtgcacgtcgcgttctcgcaaatcgcgcggcccgagcgcttcgcggacgacgataccgtgaaggcggccctggccacgccgggtgaggcccggttcgcccgtaccctcagcgatatcgagcgcctggcccaaggccccgggccgtggctgctcggggagtcgttcagcgccgtggacgcctacgccctggtcatctggcgctgggccgaacggcgcgccatcgatacgagcgcctacccggcctggagcgccaaggccgcgcgtgccctcgcgcgtccgtcggtccgccgcgcgctgcagaaggaaagcagcgcgaaggtcgcggcc

SEQ ID NO: 339 - protein, 215 aa, Artificial Sequence
  Description of Artificial Sequence: Synthetic polypeptide
MTETLRLYYSPGACSLAPHVALEETGAPFEPVRVNLAAGEQRQASYLAINQKGRVPALAEGAWVLTENPAVLRYIARRFPEAGLWPEDPRGEAACAEWLAWLASTVHVAYAHVRRAERYAGEEAAIAEVQARGREACFDLWTMIEVGLSRGGWALGERYSVADPYLLVFWIWGRGPALGYEMARLFPHWTAHARRMAARPAVQRVFAREGLALPA

SEQ ID NO: 340 - DNA, 645 bp, Artificial Sequence
  Description of Artificial Sequence: Synthetic polynucleotide
atgaccgagacgctgcgcctctactactcgcccggcgcgtgtagcctcgcgccgcacgtcgccctggaagagaccggggccccgttcgagcccgtgcgcgtgaatctggccgcgggcgaacagcgccaggcgagctacctggccatcaatcaaaagggccgcgtccccgccctcgcggaaggcgcctgggtgctcaccgaaaatcccgcggtgctgcgctacatcgcccgtcggttcccggaagccggtctgtggccggaagatccccgtggcgaggccgcctgtgccgaatggctggcgtggctggcctcgacggtccatgtcgcctacgcccacgtccggcgcgcggaacgctacgccggcgaggaagccgccatcgcggaagtgcaggcccgcggtcgcgaggcctgtttcgacctgtggaccatgatcgaggtcggcctgtcccgcggtggctgggccctcggcgaacgctacagcgtggccgatccgtacctgctggtcttctggatctggggccgtggccccgcgctgggctacgaaatggcgcgtctgttcccccactggacggcccatgcccgccgtatggccgcccgccccgccgtgcagcgcgtcttcgcccgcgaaggcctcgccctcccggcc

SEQ ID NO: 341 - protein, 228 aa, Artificial Sequence
  Description of Artificial Sequence: Synthetic polypeptide
MTASLTLISHHLCPYVQRAAIALHEKGVPFERVHIDLANKPDWFLKISPLGKVPLLSIPQDEDEAILFESTVICEYLEETQSGAKLHPADPLIRARHRGWLEFGSSILSDLWVYETTQDVQTLEAKRNTLKTKFATVEAELGDGPYFAGAGFSLVDAVFAPIFRYFDVFDTIAEHGIFDGSPRVGAWRQALAARPSVKAAVTDDYAARLVAFLEKHDAVLLKTGKIAA

SEQ ID NO: 342 - DNA, 684 bp, Artificial Sequence
  Description of Artificial Sequence: Synthetic polynucleotide
atgaccgccagcctgaccctgatctcgcatcacctgtgcccgtacgtgcagcgcgcggccatcgcgctgcatgagaagggcgtccccttcgagcgcgtccacatcgacctggccaacaagccggattggttcctcaagatcagccccctgggcaaggtgccgctcctgtcgatcccccaggacgaggacgaggccatcctcttcgaaagcaccgtgatctgtgaatatctggaggagacccaatccggcgcgaaactccatccggcggaccccctgatccgtgcccgccaccgcggttggctggagttcggcagctccatcctgagcgacctgtgggtgtacgaaaccacccaggacgtgcagaccctggaagccaagcgcaatacgctcaaaacgaagttcgccaccgtcgaggcggagctgggcgacggtccgtatttcgccggggccggcttctccctggtggacgccgtgttcgccccgatcttccgctacttcgatgtgttcgacacgatcgccgagcatgggatcttcgatggcagcccccgtgtgggtgcctggcgccaagccctcgccgcgcgtccctccgtcaaagccgccgtcaccgatgactacgcggcgcgcctggtcgcgttcctggaaaagcacgatgcggtgctgctcaagaccggcaagatcgcggcc

SEQ ID NO: 343 - protein, 212 aa, Artificial Sequence
  Description of Artificial Sequence: Synthetic polypeptide
MTLQLYFAPGASSLAPLVALEELDIPYVGHRLDLAAGDQRKPEYLKVNPRGRVPTLVVDGQPVTEVLAILTYLAHRYPHSELLPLADPLNLAKAYEVMSWFASTVHVAFAQIARPERYADDEATKAALATPGEARFARTLTDIEHLARGPGPWLLGDAFSVVDAYALVIWRWAERRSIDTALYPAWSAKAARAFARPSVVRALRKEAAPVTA

SEQ ID NO: 344 - DNA, 636 bp, Artificial Sequence
  Description of Artificial Sequence: Synthetic polynucleotide
atgaccctccaactgtatttcgccccgggcgcctcctcgctggccccgctggtcgcgctggaggagctggacatcccgtacgtcgggcaccgcctggatctggccgccggggaccagcgcaagccggagtacctcaaggtcaatccgcggggccgcgtccccaccctggtcgtcgatggtcagccggtgaccgaggtcctggccatcctgacctacctggcccatcgctatccccattcggagctcctgccgctggcggacccgctcaacctcgccaaggcgtacgaggtcatgagctggttcgcgtcgaccgtccacgtggccttcgcgcagatcgcccggcccgagcgctacgccgacgatgaagccacgaaagcggcgctggccacgccgggcgaggcgcgtttcgcccggaccctgaccgacatcgaacacctggcccgtgggccgggcccctggctcctcggcgacgccttctccgtggtcgacgcgtacgccctggtcatctggcgctgggccgaacgccggtccatcgataccgccctctaccccgcctggagcgccaaggcggcccgtgccttcgcccgcccgagcgtcgtccgcgccctgcgcaaggaagccgcccccgtcacggcc

SEQ ID NO: 345 - protein, 201 aa, Artificial Sequence
  Description of Artificial Sequence: Synthetic polypeptide
MKLFCKAGACSLSPHIVMRECGLDFTQVSVDLATKLTERGDDFRQINPKGQVPALQLSDGSVLTEGVAIVQYLADLKPDRHLLAPVGSLTRYHTVEWLSYISSELHKSFGPLFRPGYSDEVKAQTRSQLEAKFRYVDASLRDRQWLMGLHFSVADAYLFVVTRWAKALGLDLSGFTALEAWFDRVAERPAVQAALKAEGLA

SEQ ID NO: 346 - DNA, 603 bp, Artificial Sequence
  Description of Artificial Sequence: Synthetic polynucleotide
atgaagctgttctgtaaggcgggcgcctgtagcctgtccccgcatatcgtgatgcgggagtgcggcctggacttcacccaggtgtccgtggacctggcgaccaagctcaccgaacggggcgacgacttccgccagatcaaccccaaagggcaggtgccggccctgcagctctccgacgggagcgtcctcaccgaaggcgtcgcgatcgtccagtatctggccgacctgaaaccggaccgtcatctgctggccccggtgggcagcctgacccgttatcacaccgtggagtggctgagctacatctcgtccgagctccacaagagcttcgggccgctcttccgccccgggtattcggacgaggtcaaggcgcaaacccgcagccagctggaagcgaagttccgctacgtggatgcctccctccgcgaccggcagtggctgatgggtctccacttctcggtggccgatgcctatctgttcgtcgtcacccgctgggccaaggcgctgggtctggatctgtccgggttcaccgccctggaagcgtggttcgaccgggtcgccgaacgcccggcggtccaggcggcgctgaaagccgaaggtctggcc

SEQ ID NO: 347 - protein, 250 aa, Artificial Sequence
  Description of Artificial Sequence: Synthetic polypeptide
MAINETSNPQIKSLQGVHLYHFGMSSCSQRVRFALEEKGIEWQSHPVNLHLMENATSEYQQIHPKGYVPAFIHDGTLLLESVDIIAYVDDVFDGPELHPNNEKQKCEMQKWIDLSNANQWCLKHLTYELIFKKLGHYSDPKEVDYYLTHQKNPELLQFVKDFVAGFSDELVQSKINEAYEFLSALNERLCAADYLAGNGFSLADIAAIVNVHRYKLCGLHVEQYANLVQWYTKVAARDGFQRAVVAWEPR

SEQ ID NO: 348 - DNA, 750 bp, Artificial Sequence
  Description of Artificial Sequence: Synthetic polynucleotide
atggcgatcaatgagacgtccaacccgcagatcaagagcctgcagggcgtccacctgtaccatttcggcatgtcctcgtgcagccagcgggtgcgtttcgcgctggaagaaaaggggatcgaatggcagagccatccggtgaatctgcacctgatggagaatgccaccagcgaatatcagcagatccacccgaagggctatgtcccggccttcatccacgatgggacgctcctgctggaatcggtggacatcatcgcctacgtggacgacgtcttcgacggtccggaactgcaccccaacaacgagaagcagaagtgcgagatgcagaaatggatcgacctcagcaacgcgaaccagtggtgcctgaagcacctgacctacgagctcatcttcaagaagctgggccactacagcgacccgaaggaggtggactactatctgacgcaccagaagaaccccgagctgctgcagttcgtcaaggacttcgtcgcgggcttctccgacgagctcgtccagagcaagatcaacgaagcctacgagttcctgtcggccctcaacgagcgcctgtgcgccgcggattacctggccggcaacggtttcagcctggcggatatcgcggcgatcgtgaacgtgcaccgttacaagctgtgcggcctccatgtggaacagtacgcgaacctggtgcagtggtatacgaaggtcgccgcccgcgatggcttccagcgtgcggtggtcgcgtgggagccccgg

SEQ ID NO: 349 - protein, 219 aa, Artificial Sequence
  Description of Artificial Sequence: Synthetic polypeptide
MTLKLYFSPGACSFVPHALLETTGEPFEPVLVKLHKNEQQSPEYKAVNPRGQVPVLVADGQVITQIVAIVGWLHERFPRHGFLPAEPLARAKVMETLAWMNNTVHPTFTHVFMPFKFTDQPEAQAAIKAYNTGLYRPMLGEIEALAQAAAGRGQAWLGGAQFGPLDAYALTLLRWGGFAGIDPTGFPALWAHVQKVAQLPAVARVIERERLQLNVYKAG

SEQ ID NO: 350 - DNA, 657 bp, Artificial Sequence
  Description of Artificial Sequence: Synthetic polynucleotide
atgacgctgaagctgtatttctcgccgggcgcctgtagcttcgtgccccatgccctgctggagacgacgggcgaaccgttcgagccggtgctggtgaagctgcacaagaacgaacagcaatcgccggagtacaaggcggtcaacccccgtggtcaggtgcccgtcctggtggccgatggccaggtgatcacccagatcgtcgccatcgtggggtggctccacgagcgcttcccccggcacgggttcctgccggcggagccgctcgcccgcgccaaggtcatggagaccctggcgtggatgaacaacacggtgcacccgaccttcacccacgtcttcatgcccttcaagttcaccgaccagcccgaggcgcaggcggcgatcaaggcgtataacaccgggctgtaccgtccgatgctcggcgaaatcgaagccctggcccaggccgccgccggtcgtgggcaagcctggctgggcggtgcgcagttcgggccgctggatgcgtacgcgctcaccctgctccgctggggtggcttcgcgggcatcgatccgaccgggttcccggccctctgggcgcatgtccagaaagtcgcgcagctgccggccgtcgcgcgcgtcatcgagcgcgagcgtctgcaactgaacgtgtataaggccggc

SEQ ID NO: 351 - protein, 234 aa, Artificial Sequence
  Description of Artificial Sequence: Synthetic polypeptide
MTDLSSFPITQRWPASYPDRLQLYAAPTPNGVKVSMMLEETGLPYEPHFVDISNNESKDPAFVSLNPNGRIPAIIDPAGPDGQPIGIWETGAILIYLADKTGQLISTTPAQRYETLAWVFFQVSGVGPTFGQLGFFLRFAGKDYEDKRPRQRFVDESRRLLGVLDHRLEGREWIVDDYSIADIATFGWVNALVEFYAAGDILGLSSYSNVQAWLERGLARPAVQRGLRIPARPA

SEQ ID NO: 352 - DNA, 702 bp, Artificial Sequence
  Description of Artificial Sequence: Synthetic polynucleotide
atgaccgatctcagctcgttccccatcacccagcgctggcccgccagctaccccgaccggctgcagctctacgcggcgccgacccccaacggcgtgaaggtgagcatgatgctggaggaaaccggcctgccgtacgagccgcacttcgtggacatctcgaacaacgagtcgaaggacccggcgttcgtcagcctgaacccgaacggccgcatcccggcgatcatcgatccggccggcccggacggtcagccgatcggcatctgggagaccggcgcgatcctgatctacctggccgacaagaccggccagctgatctccaccaccccggcgcagcgttatgagaccctggcgtgggtgttcttccaggtgtcgggtgtggggccgaccttcggccagctgggcttcttcctgcgtttcgcggggaaggactacgaagacaaacgtccccgccaacgcttcgtcgacgaaagccgccgtctgctgggcgtcctggatcaccggctggaaggccgggagtggatcgtggacgactactcgatcgccgatatcgcgaccttcggctgggtcaacgccctcgtggagttctacgccgccggggatatcctgggcctgtcgtcctatagcaacgtccaagcctggctcgaacgcggtctcgcgcggcccgcggtccagcgcggcctccgtatcccggcgcggccggcg

SEQ ID NO: 353 - protein, 204 aa, Artificial Sequence
  Description of Artificial Sequence: Synthetic polypeptide
MQLYCAPGTISVAVAIALHEAGIEHEKVQLDFRAAEQTKPAYQQINPKGRVPALALPGGILTETGALLEFIADSAPDKGLVPADPLLRARMREVMYYLATTMHVNHAHKLRGARWADRADSWADMTAKVPETMATSAAYVERNGLRGPFVLGEVLSIADCYLYVVTGWLEGDGVDLEPFPKIRAFRAAMEARESVRAVKAAGLL

SEQ ID NO: 354 - DNA, 612 bp, Artificial Sequence
  Description of Artificial Sequence: Synthetic polynucleotide
atgcagctgtattgcgcgccgggcaccatcagcgtggcggtggccatcgcgctgcatgaagccgggatcgagcacgaaaaggtccaactcgacttccgggcggcggagcagaccaaaccggcctaccagcagatcaatccgaaggggcgtgtcccggccctcgccctgccgggtggcatcctgacggagaccggcgccctgctggagttcatcgcggactcggcccccgacaagggcctggtgccggcggaccccctgctgcgtgcgcgtatgcgggaggtgatgtactacctggcgaccaccatgcatgtcaaccatgcccacaagctgcgcggggcgcgctgggcggaccgcgcggactcctgggccgacatgaccgccaaagtgccggaaaccatggccacctcggcggcctatgtcgaacgtaacggcctgcggggcccgttcgtcctgggcgaggtcctcagcatcgccgactgctacctgtacgtcgtcaccggctggctggaaggcgacggggtggatctggagcccttccccaagatccgcgccttccgtgccgccatggaagcccgcgagagcgtccgtgccgtgaaagcggccggcctgctc

SEQ ID NO: 355 - protein, 217 aa, Artificial Sequence
  Description of Artificial Sequence: Synthetic polypeptide
MSLIVYGVPLSPYVRKVCLCLAAKQLDYKLEIVSPFNQPAWFFELNPLGRIPALKDGDLVLADSSVICQYLDDKYTGNTALLGDTVEQTAQVRWLEKYADYELAPLTTFTVFQQRVINLGMQKVCDESLVKLAMNEQLPPHFDYLEGVLGHNDYFVGNALTLADIAFASQIINMQHAGEQINAQRWPNLAALFERVKALPAMQTLLQSEQAMLASMQ

SEQ ID NO: 356 - DNA, 651 bp, Artificial Sequence
  Description of Artificial Sequence: Synthetic polynucleotide
atgagcctcatcgtgtacggcgtccccctctcgccgtacgtccgtaaggtctgtctctgcctggcggccaagcagctcgactacaagctggagatcgtctcgccgttcaaccagcccgcctggttcttcgaactgaatcccctgggccgcatcccggccctgaaagacggcgatctcgtgctcgcggactcctcggtcatctgtcagtacctcgacgacaagtacaccggcaacacggccctgctgggtgatacggtggaacagaccgcccaggtgcggtggctggaaaaatatgccgactacgagctggccccgctgaccaccttcaccgtgttccagcagcgcgtcatcaacctgggcatgcagaaggtctgcgacgagagcctggtgaagctggccatgaacgagcagctgccgccgcatttcgattacctggagggcgtgctgggccataacgattacttcgtcggcaacgccctgaccctggcggacatcgcgttcgcgtcccagatcatcaacatgcaacacgcgggcgagcaaatcaatgcccaacgttggccgaacctggcggcgctgttcgagcgcgtcaaggcgctcccggccatgcagaccctgctgcagtcggaacaggccatgctggcgagcatgcag

SEQ ID NO: 357 - protein, 233 aa, Artificial Sequence
  Description of Artificial Sequence: Synthetic polypeptide
MSQPDIILYTANTMNGWKPLIFLHEAEIDYELVNVDFSKKEQHAPDYVKMNPNGKIPTIWDRSEGRAIFESGAILWHLAEKYGRFLSSDPVERSETLQWLFFQVGHIGPIMGQAMFFQRIAKPNGDEVPYAIKRYVDESRRLLEVLDTRLAGRDWLVGTEMSIADIATYPWARSHFWATVEVEGLPHLQAWFDRLDAMPKVQEALQLPEPRPSAFGKGDIAAAASANAARFKE

SEQ ID NO: 358 - DNA, 699 bp, Artificial Sequence
  Description of Artificial Sequence: Synthetic polynucleotide
atgtcgcagccggacatcatcctgtatacggccaacaccatgaacgggtggaagcccctgatcttcctccacgaagccgagatcgactatgagctcgtcaacgtggacttctcgaagaaggagcagcacgcccccgactacgtgaagatgaacccgaacgggaagatccccaccatctgggaccgcagcgagggccgtgcgatcttcgagtccggcgcgatcctgtggcatctggccgagaagtatggccgtttcctcagcagcgatccggtggaacggtccgaaaccctgcagtggctcttcttccaggtgggtcacatcggcccgatcatggggcaggccatgttcttccaacgcatcgcgaagccgaacggggacgaggtcccctacgcgatcaagcggtacgtggacgagtcccgccgcctcctggaggtcctggatacgcgcctggcgggccgcgactggctggtgggtaccgagatgtccatcgcggatatcgccacgtatccgtgggcccgttcccacttctgggccacggtggaagtcgagggtctcccgcatctgcaggcgtggttcgaccggctcgacgcgatgccgaaggtccaggaggcgctccaactgcccgaaccgcgccccagcgcgttcggcaagggcgatatcgcggcggcggccagcgccaatgccgcccgtttcaaggaa

SEQ ID NO: 359 - protein, 221 aa, Artificial Sequence
  Description of Artificial Sequence: Synthetic polypeptide
MARLFHVPLSPFCRKVRLSLAEKKIEVERVEERYWEQDPDFMRRNPAGKVPVLQLDGIIMSESAAICEYIEETRPEPSLMPSDPVQRLEVRRLVSWFDDKFHDEVTSKLLYERVNKKVMKQGFPDSRNVKDGAKAIKYHIDYMAWLLDHRRWLAGDVMTLADFAAAAHLSSLDYISDVDWNRSDVVKDWYAKIKSRPAFRSLLADQVPGFPPPKHYNDLDF

SEQ ID NO: 360 - DNA, 663 bp, Artificial Sequence
  Description of Artificial Sequence: Synthetic polynucleotide
atggcgcgcctgttccatgtccccctgtccccgttctgtcgcaaggtgcgcctgtccctggcggagaagaaaatcgaggtggagcgcgtggaagaacgctactgggagcaagacccggacttcatgcgtcgcaatccggccggcaaggtgccggtgctccagctggacggcatcatcatgtcggaaagcgccgccatctgtgagtatatcgaggagacccgccccgaaccgagcctgatgccctccgacccggtccaacgcctggaggtgcgccgcctggtgagctggttcgacgacaagttccacgacgaggtgaccagcaagctgctgtacgaacgcgtgaacaagaaggtgatgaagcagggcttccccgactcccgtaacgtgaaggacggcgcgaaggccatcaagtaccatatcgattacatggcctggctgctcgaccaccggcgttggctggccggggacgtgatgacgctggccgatttcgccgccgcggcccatctgtcgtccctcgattacatctcggacgtcgactggaaccgcagcgacgtggtgaaggactggtacgcgaagatcaaatcgcgtccggcgttccgctcgctgctcgccgaccaagtcccgggcttcccgccgccgaagcactataacgacctggacttc

SEQ ID NO: 361 - protein, 209 aa, Artificial Sequence
  Description of Artificial Sequence: Synthetic polypeptide
MILYDYFRSSAAYRVRIALNLKGLRYEQVPVNLLENEQQSCMHKRRNPQGLVPALNHNGELLQQSLAICEYLDEVYPDSPRLLPDSPLERARVRALAQLIACDIHPVNNLRVLKYLENEFSVDEAQKRQWYRHWIEEGFKALEVHLQPSANQWMFCQGDTPGLADLCLVPQCYNARRFDVDLSQFPTLLQIEANCEELQAFSMAHPEMQ

SEQ ID NO: 362 - DNA, 627 bp, Artificial Sequence
  Description of Artificial Sequence: Synthetic polynucleotide
atgatcctctacgattacttccgcagcagcgccgcgtatcgcgtccgcatcgccctcaacctgaaaggcctgcgctacgaacaggtccccgtcaacctcctggagaatgagcagcagtcctgcatgcataagcggcgtaacccgcagggtctggtgccggccctgaaccacaacggcgagctgctgcagcagtcgctggccatctgcgaatacctggacgaagtctacccggacagcccccgcctcctgccggactccccgctggagcgtgcccgtgtgcgcgccctggcgcagctgatcgcctgtgacatccacccggtcaacaacctgcgggtcctgaagtacctggagaacgagttcagcgtcgacgaagcgcagaagcgccagtggtaccggcactggatcgaggaggggttcaaggcgctggaagtccacctgcagccgagcgccaaccagtggatgttctgtcagggtgacacgccggggctggcggatctgtgcctggtcccccaatgctataacgcgcgccgcttcgatgtggacctgtcgcagttcccgaccctgctgcagatcgaagccaactgcgaggaactgcaggccttctccatggcgcatccggagatgcaa

SEQ ID NO: 363 - protein, 204 aa, Artificial Sequence
  Description of Artificial Sequence: Synthetic polypeptide
MKLYYAKGTISIAVAIALHEAGLDFEPMRLDFRAGEQTGAAYLAINPKGRVPTLVTDTSILTETGAILDFIADTTPQAGLRPTDPLKAAKMREAMYYIASTMHVNHAHKMRGHRWADQQSSFDDMKAKSVQTMTDSADYVENHILTGPFVLGETLSLADAYLFVACNWLEGDGVDVAKFPKIAAFVQAMRARPSVERVIADNMI

SEQ ID NO: 364 - DNA, 612 bp, Artificial Sequence
  Description of Artificial Sequence: Synthetic polynucleotide
atgaaactgtactacgcgaagggcaccatctccatcgcggtggccatcgccctgcatgaagcgggcctggacttcgaacccatgcgtctcgacttccgtgccggcgaacagaccggcgccgcctatctggccatcaaccccaagggtcgcgtgccgaccctggtgaccgacacgagcatcctgaccgaaaccggggcgatcctcgacttcatcgccgatacgacgccgcaggcgggcctgcggccgaccgaccccctgaaagccgccaagatgcgcgaggccatgtattacatcgcgtccacgatgcacgtgaaccacgcccacaagatgcgcggccaccgttgggccgaccagcagtcgtcgttcgacgacatgaaggccaagtcggtgcaaaccatgaccgacagcgccgactacgtcgagaatcacatcctgacgggcccgttcgtgctgggcgagaccctgagcctcgccgacgcctacctcttcgtggcgtgtaattggctcgaaggcgatggggtggacgtggccaagttcccgaaaatcgcggccttcgtccaagcgatgcgcgcccggcccagcgtggaacgcgtcatcgcggacaacatgatc

SEQ ID NO: 365 - protein, 104 aa, Artificial Sequence
  Description of Artificial Sequence: Synthetic polypeptide
MSRLTLISHHLCPYVQRAAITLLEKGVPFERINIDLANKPDWFLKISPLGKVPLLRIEEEDGSEAVLFESSVICEYLEETQAGAALHPADPLTRARHRGWMEFG

SEQ ID NO: 366 - DNA, 312 bp, Artificial Sequence
  Description of Artificial Sequence: Synthetic polynucleotide
atgtcgcgcctgacgctgatctcccatcatctgtgtccctatgtccaacgcgccgcgatcaccctcctggagaagggggtccccttcgagcggatcaacatcgacctggccaacaagccggactggttcctcaaaatcagccccctgggcaaagtgccgctgctccggatcgaggaggaggatggctccgaagcggtgctcttcgagtcgagcgtgatctgcgagtatctggaggagacccaagccggtgccgccctgcatccggccgaccccctgacgcgtgcgcgtcatcggggttggatggagttcggt

SEQ ID NO: 367 - protein, 201 aa, Artificial Sequence
  Description of Artificial Sequence: Synthetic polypeptide
MKLFYKPGACSLSPHIVLRETGLDFSVERVDLATKKTEHGDDFLAINPKGQVPALVLDDGSLLTEGVAIVQYLADQVPSRNLIAPAGTLARYHAIEWLNYIATELHKGFSPLFNPKTPDEYKIIARERLDQQFMYVDGVLSQQHFLLGDKFSVADAYLFTILGWAKAMQFDLPQYKNLTAYINRVAARPAVDGALVAEGLK

SEQ ID NO: 368 - DNA, 603 bp, Artificial Sequence
  Description of Artificial Sequence: Synthetic polynucleotide
atgaagctgttctacaaaccgggcgcctgctcgctgtccccgcacatcgtcctgcgtgaaaccggcctcgacttcagcgtcgagcgtgtcgacctggccaccaagaaaacggaacacggcgacgacttcctcgcgatcaaccccaaggggcaagtgccggcgctggtcctggacgatggctcgctgctgaccgagggcgtcgccatcgtccagtatctggcggaccaggtcccctcccgtaatctgatcgcccccgcgggtaccctggcccgctatcatgccatcgagtggctgaactacatcgcgaccgagctccacaaaggcttcagcccgctgttcaacccgaaaacccccgacgaatacaagatcatcgcccgtgagcgcctggaccagcagttcatgtatgtcgacggcgtcctgagccaacagcacttcctcctgggcgataagttctcggtcgccgacgcctacctgttcaccatcctcggctgggcgaaggccatgcaattcgacctgccgcagtacaagaacctgaccgcctacatcaatcgggtggccgcgcgcccggcggtggatggcgcgctggtcgcggagggtctgaag

SEQ ID NO: 369 - protein, 232 aa, Artificial Sequence
  Description of Artificial Sequence: Synthetic polypeptide
MIKFYFHPTPNPMKVALFLAEAELPFEVIPVDTMKGEQHEQAFRAINPNGKLPAIDDDGTVVFDSNAILLYLADKHGLFAGRPEDRGALLSWLMFIASGLGPYSGQAVHFQRAAPETVDYAINRYRREAERHYAILDARLADRTYFLGDDYTIVDIAAWGWIDRHTPVLGPDALEAYPNLKRWFDHINARPAVAKARDIGTDITFKSERDEVAMRALFPQNYAEELVEAKAS

SEQ ID NO: 370 - DNA, 696 bp, Artificial Sequence
  Description of Artificial Sequence: Synthetic polynucleotide
atgatcaaattctacttccacccgaccccgaacccgatgaaggtggccctgttcctggccgaggccgagctcccgttcgaggtgatccccgtggataccatgaagggcgagcagcacgaacaggcgttccgcgccatcaaccccaacgggaagctgccggcgatcgatgacgatggcaccgtggtgttcgactccaacgcgatcctcctctacctcgccgataagcacggcctgttcgccggccgcccggaggatcgtggcgccctgctgagctggctgatgttcatcgcctcgggcctcggtccgtactcggggcaagcggtgcatttccagcgggccgcccccgaaaccgtggactacgcgatcaaccgctatcggcgcgaggccgaacgccactacgcgatcctggatgcccgcctcgccgaccggacgtatttcctcggcgacgactatacgatcgtcgacatcgcggcgtggggctggatcgatcggcataccccggtgctgggtccggacgccctggaagcgtatcccaacctgaagcggtggttcgaccatatcaacgcccgtcccgccgtggccaaggcccgggacatcggcaccgacatcaccttcaagtccgagcgcgacgaggtggcgatgcgtgccctcttcccgcagaactacgcggaggaactggtcgaggccaaggcctcg

SEQ ID NO: 371 - protein, 205 aa, Artificial Sequence
  Description of Artificial Sequence: Synthetic polypeptide
MQLYYAPNTISVATAITLEEAALDHEAIRVDFAAGEQTTAAYRQINPKGRVPALVVEGGILTETGALLEFIAAKAPEAGLVPDDPLQAARMREVMYYLASTMHVNHAHKMRGHRWADRKSSWKDMAAKVPQTMTDSCKYIEANGLRGPFVLGQRFSLADPYLYVVCSWLEGDGVDVSAFPKIVAFRDAMEARASVRAVRAAGMLG

SEQ ID NO: 372 - DNA, 615 bp, Artificial Sequence
  Description of Artificial Sequence: Synthetic polynucleotide
atgcagctgtattacgcgccgaacaccatctcggtcgccaccgccatcaccctcgaagaagccgcgctggaccatgaggccatccgcgtggacttcgcggccggggaacaaaccaccgccgcctatcgccagatcaatccgaagggccgtgtgccggccctggtggtcgagggcggcatcctgaccgagaccggggccctgctggagttcatcgccgccaaggcccccgaagcgggcctggtccccgacgacccgctgcaagccgcgcgtatgcgcgaagtgatgtactacctcgcgagcaccatgcacgtcaaccacgcccacaaaatgcgcggtcaccggtgggccgaccgcaaaagctcgtggaaggacatggccgccaaagtcccgcagacgatgaccgacagctgcaagtacatcgaggcgaatggcctgcgggggcccttcgtcctgggccagcggttcagcctcgccgacccctatctgtacgtggtctgcagctggctggagggcgacggcgtggacgtgagcgccttccccaagatcgtggcgttccgcgacgccatggaagcccgggccagcgtccgtgccgtccgcgccgccggcatgctcggc

SEQ ID NO: 373 - protein, 217 aa, Artificial Sequence
  Description of Artificial Sequence: Synthetic polypeptide
MLKLHGYWRSSAAYRVRIALNLKNLPYEQVSHDLRTGEQHSAAYKALNPQGLVPALEHDGEVITQSQAILEWLDERFPEPALLPATPEARAAVRAMCGLVACDIHPLNNLRVLKALKTDLMADENAIKRWTKGWIGEGFAALDQLIAHHGHGYCFGNAPTLADCLLIPQIFSAQRFEVDLKPYPNIRAVGEHCADHPAFNRAHPRHQPDADTVDAQV

SEQ ID NO: 374 - DNA, 651 bp, Artificial Sequence
  Description of Artificial Sequence: Synthetic polynucleotide
atgctgaagctgcatggctactggcgttcgagcgcggcctaccgtgtccggatcgcgctgaacctcaaaaacctgccgtacgagcaggtcagccacgatctgcgcaccggcgaacaacacagcgccgcctataaagccctcaacccgcagggtctggtcccggccctcgaacacgacggggaggtcatcacgcaatcgcaggcgatcctggagtggctggacgaacgcttcccggaaccggccctgctgcccgccacgccggaagcccgtgcggcggtccgggccatgtgtggtctcgtcgcctgcgacatccatccgctcaataatctgcgcgtcctcaaggccctgaagaccgacctgatggcggatgagaacgcgatcaagcgctggaccaagggttggatcggggaagggttcgcggcgctggaccagctcatcgcccatcatggccacggctactgcttcggcaacgcgcccaccctggccgactgcctcctgatcccccagatcttctcggcccagcgcttcgaggtcgatctgaaaccgtatcccaatatccgtgcggtgggggagcattgcgcggatcaccccgcgttcaatcgtgcccacccgcggcatcagcccgacgccgataccgtcgatgcgcaggtc

SEQ ID NO: 375 - protein, 224 aa, Artificial Sequence
  Description of Artificial Sequence: Synthetic polypeptide
MSAPLKLISHKLCPYVQRAVISLKEKGVPFERIDIDLDNKPDWFLKISPLGKVPVLQVRDKAVFESAVILEYLEETLPNPLHPQDPLTRAEHRAWIEFGSAVLGDIWGLETVADEAAFKAKAKQAADKFARLEARLVAEPFFDGEKFSLVDAVFAPVFRYFDVFEEIGDFGILDNKPRIARWRKSLRERASVREAVSADYPALLRAFMEKHKSYLSQLDRRAAA

SEQ ID NO: 376 - DNA, 672 bp, Artificial Sequence
  Description of Artificial Sequence: Synthetic polynucleotide
atgtcggcgccgctgaaactcatctcccacaagctctgtccgtacgtgcagcgtgccgtgatcagcctgaaggagaagggcgtgcccttcgaacgcatcgacatcgacctggacaacaagccggattggttcctcaagatctcgcccctgggcaaggtcccggtcctccaggtgcgggataaggccgtgttcgaaagcgccgtgatcctggagtacctggaggaaacgctgcccaaccccctccacccgcaagacccgctgacccgcgccgagcatcgcgcctggatcgagttcggttcggccgtcctgggcgacatctggggtctggagaccgtcgccgacgaagccgccttcaaggccaaggcgaagcaggccgccgacaagttcgcccgcctcgaagcgcggctggtggccgaacccttcttcgacggcgagaagttctccctggtggacgccgtcttcgcgcccgtcttccgctacttcgacgtcttcgaggagatcggggacttcggcatcctggacaataagccccgcatcgcgcgctggcgcaagagcctgcgtgaacgcgcgagcgtccgcgaggccgtcagcgccgattacccggccctgctgcgggccttcatggagaagcataagtcctatctgagccagctggaccgtcgcgccgccgcc

SEQ ID NO: 377 - protein, 221 aa, Artificial Sequence
  Description of Artificial Sequence: Synthetic polypeptide
MEEEAKVVLLGARFSMFEMRVKIALAEKGIKYEYMEQDLTNKSTLLQEMNPIHKKIPVLIHHGRPICESLIIVEYIDMVWDNNCPLLPSDPYHKAQARFWADFVDQKVYHASKRVWISKGDEKEVAKKDFLESLKQLEEFLGDKPYFGGDTFGFVDVALIPFYCWFYTYETFGNFKVEGEYPKLISWAKRCMQKESVSETLADEREVYEAVLDYKNKFILN

SEQ ID NO: 378 - DNA, 663 bp, Artificial Sequence
  Description of Artificial Sequence: Synthetic polynucleotide
atggaagaagaagccaaggtcgtcctgctgggggcccgcttctccatgttcgagatgcgcgtgaagatcgccctggcggagaagggcatcaagtacgagtacatggagcaggacctgaccaataagagcaccctgctgcaagagatgaatccgatccataagaagatccccgtgctgatccaccatggccgccccatctgtgagtccctgatcatcgtcgagtacatcgatatggtgtgggacaacaactgtccgctgctcccgtccgacccctatcataaggcgcaggcccgcttctgggcggatttcgtggatcagaaagtgtaccatgcctccaaacgggtgtggatcagcaagggcgacgaaaaggaggtcgcgaagaaggacttcctggagtccctgaagcaactggaggagttcctgggtgacaagccgtacttcggtggcgataccttcgggttcgtggacgtggccctgatcccgttctactgctggttctatacgtacgagaccttcggcaacttcaaggtggagggcgagtatccgaagctgatctcgtgggccaagcgctgcatgcagaaggagagcgtgagcgaaaccctcgccgatgaacgcgaggtgtacgaagcggtcctggactacaagaacaagttcatcctgaac

SEQ ID NO: 379 - protein, 233 aa, Artificial Sequence
  Description of Artificial Sequence: Synthetic polypeptide
MAGGGDELKLLGMWASPFALRAKLALSFKGLSYEYVEEDLKNKSELLLSSNPVHKKVPVLIHNGKPVCESQVIVQYIDEAFPDAGVPLLPSDPYDRAVARFWAAYIDDKLLKSWLQASMCKTEQEKAAAMKETFAAVANLEAAFKECSKGKPFFGGDAVGYVDVTLGAVIGFVRVGEALHGMRLFDASRSPLLDAWLDRFAALDAAKAVLPDTGRLAEYAKMKQAEWAAAATN

SEQ ID NO: 380 - DNA, 699 bp, Artificial Sequence
  Description of Artificial Sequence: Synthetic polynucleotide
atggccggtggcggggacgaactgaagctgctcggcatgtgggcctccccgttcgccctgcgcgccaagctggcgctgagcttcaaggggctcagctatgagtacgtggaggaggacctgaaaaacaagtcggagctgctgctgtcgagcaaccccgtgcataagaaggtcccggtgctgatccacaacggcaagcccgtctgcgaaagccaagtcatcgtgcagtacatcgacgaggccttccccgacgcgggggtcccgctgctcccgtcggacccgtacgatcgcgccgtcgcgcgcttctgggccgcctacatcgatgacaagctcctcaagtcctggctccaggcctccatgtgcaagaccgagcaggagaaggccgcggcgatgaaagaaaccttcgcggcggtcgccaacctggaggccgcgttcaaggagtgctccaagggcaagcccttcttcggtggggacgcggtcggctacgtggatgtgacgctgggcgccgtcatcggcttcgtgcgggtgggcgaagcgctccatggcatgcggctgttcgacgccagccgctcgcccctcctggatgcgtggctggatcgtttcgcggccctggatgcggccaaggcggtcctgccggacaccggccgtctggccgaatatgcgaagatgaagcaggcggagtgggccgccgccgccaccaat

SEQ ID NO: 381 - protein, 206 aa, Artificial Sequence
  Description of Artificial Sequence: Synthetic polypeptide
MKIYETTGFPNPLRVRIALAEKGATNKVIFVPVDVMGGEHRTSAFKAKNPDATVPLLELDDGTCIAHCNAITEYLDGIFDGPSLTGTSSKERAVIAMMNIRAESGLMNAVGAYFHHATQGLGPDLETWQCPDWGSKQKEVAQLTMTYLDGVLTESDFVAGNRFTVADITAYAGLAFAEFAKVEIPENLRALRAWRDRVAARPSING

SEQ ID NO: 382 - DNA, 618 bp, Artificial Sequence
  Description of Artificial Sequence: Synthetic polynucleotide
atgaagatctacgagaccaccggcttcccgaatccgctgcgggtgcggatcgccctggccgaaaagggtgccaccaacaaggtcatcttcgtgccggtggatgtcatgggtggcgagcaccggacctcggcgttcaaagcgaagaaccccgacgccaccgtgccgctcctcgaactggacgacggcacgtgcatcgcccactgcaacgccatcaccgagtatctggacggcatcttcgacggcccctcgctgacggggaccagctcgaaagagcgcgccgtgatcgcgatgatgaacatccgtgcggagtcgggcctgatgaatgccgtcggggcctacttccaccatgccacccaaggcctgggcccggatctggaaacctggcagtgccccgactggggctcgaagcagaaggaagtcgcccagctcaccatgacctacctggacggggtgctgaccgagagcgacttcgtggcgggcaaccggttcaccgtggcggatatcaccgcctatgccggcctggcgttcgcggagttcgccaaggtggagatcccggagaatctccgcgcgctccgcgcctggcgtgaccgcgtcgccgcccggcccagcatcaatggc

SEQ ID NO: 383 - protein, 214 aa, Artificial Sequence; identical to SEQ ID NO: 271
  Description of Artificial Sequence: Synthetic polypeptide

SEQ ID NO: 384 - DNA, 642 bp, Artificial Sequence
  Description of Artificial Sequence: Synthetic polynucleotide
atggccaccatcaaagtgcatgggagcccgatctcgaccgcgaccatgcgcgtgaccgccacgctgtacgaaaaggagctggagttcgagttcgtgtcgatcaacatgcgcaacggggaacacaagaaagaaccgttcatcagcatcaaccccttcgggcaagtgcccgccttcgaggacggcgatctgaagctcttcgaaagccgggcgatcacgcagtacatcgaccacgagtacgcggacaaggggaccaagctgacctcctccgactcgaagaagatggccatcatgagcgtctggtcggaggtggagagcctgcactatgacaaggtcgcgagcatcctggtctgggaactggggatcaagaccctgttcggtatccccctggattcgaaggtcgtggaagagaacgaagcgaagctcgactccatcctcgacgtctacgaaaagcgcctgagcgagtccaagtacatgggcggcgagtgtttcaccctcgtggacctgcatcacctcccctcgctgcactatctgatgaagagccaaagcaagaagctgttcgagtcgcgcccgtatgtgaatgcctgggtggacgatatcacggcccgtccggcctggagcaaggtgctggcgatgatcccgaac

SEQ ID NO: 385 - protein, 250 aa, Artificial Sequence
  Description of Artificial Sequence: Synthetic polypeptide
MAAAAAEATGGGGGGREEGLTLLGFWTSPFALRARFALNLKGIPYEYVEEDLFGERGKSQLLLASNPAHGGKVPVLIHGGRAVAESLVIVEYVDEAFPESLPRLLPDDPHGRAAARFWAAYVDQKLLPTWIPLYGGKTAEERARAAGEVVSVLEAFEGELGDKDFFGGDGVGLVDVVLGGFVGWLRASEAMCGVRTLDPARTPRLAAWAGRFGALDGVREIVPDAAPLVEYNLMKRARRGLPYLPPHQTQ

SEQ ID NO: 386 - DNA, 750 bp, Artificial Sequence
  Description of Artificial Sequence: Synthetic polynucleotide
atggcggcagccgcggccgaagcaaccggcgggggcgggggaggacgcgaagaaggcctgaccctgctcgggttttggacgtcaccgttcgcgctgcgagctcgcttcgcgctgaatctgaaggggattccctacgagtatgtcgaggaggacctcttcggcgaacgtggaaagagccagctgctgctcgcctcaaaccccgcccatggcggcaaggtgccagtcctgatccatggcggcagggcggtagcggaaagcctcgtcatcgtggagtacgtcgacgaggcgtttccggagtccctcccgcgtctgctcccggacgatccacatggcagggcggcggcccgcttttgggccgcgtatgtcgaccaaaagttgctgccgacatggattccgctgtatggcggcaagactgcggaggaacgcgcccgtgcggccggcgaagtggtctcagtcctcgaagccttcgaaggcgagctgggcgacaaagacttcttcggtggtgacggcgtgggcctggtcgatgttgtgttgggcggcttcgttggctggttgagagcaagcgaggccatgtgcggcgtgcgcacccttgatccggcgcgcaccccgagactggccgcctgggccggccgatttggcgcactggacggagtgcgcgagatcgtacccgacgccgcgccgctggtggaatacaacctgatgaaacgcgcgcgccgtggcctgccgtatcttccaccgcatcagacccag

SEQ ID NO: 387 - protein, 232 aa, Artificial Sequence
  Description of Artificial Sequence: Synthetic polypeptide
MAEEIILLGVWSSMFGMRVRIALAEKGLKYEYREEDLSNKSPLLLEMNPVHKKIPVLIHNCKPICESLIIVEYIDEVWKDRSPLLPSDPYQRAQARFWADFVNKKSFLLTSLFAVHYLLPFSRTSLINSTVHLPTKLFQSAFFGLAHLKLLEGVLGDPYFGGDTLGFLDIALVTFYSWFFVYETFGNFSIEAECPKLMAWAKRCRGKESVARSLADQHQVYEFLSNKYGVTK

SEQ ID NO: 388 - DNA, 696 bp, Artificial Sequence
  Description of Artificial Sequence: Synthetic polynucleotide
atggcggaagaaatcatcctgctgggcgtgtggagcagcatgttcggcatgcgggtccgtatcgcgctcgcggaaaagggcctgaagtacgagtaccgcgaggaggacctgagcaataagtccccgctgctgctggagatgaacccggtgcacaagaagatcccggtcctgatccataattgcaagccgatctgcgagtccctgatcatcgtcgagtatatcgacgaagtctggaaggatcgtagccccctcctgccgtcggacccgtatcaacgggcccaggcgcgcttctgggccgacttcgtcaacaagaagagcttcctgctgacgagcctcttcgccgtgcactacctgctccccttcagccgtacgtccctcatcaacagcaccgtgcatctgcccaccaagctcttccagtcggcgttcttcggcctggcgcacctgaaactgctggaaggcgtcctcggtgacccctacttcgggggcgacaccctcggcttcctggacatcgccctcgtcaccttctactcctggttcttcgtctacgagaccttcggcaatttctccatcgaggccgaatgtccgaagctgatggcctgggcgaagcgctgccgtggcaaggagagcgtcgcccggagcctggcggatcagcatcaagtctacgagttcctctccaacaagtacggtgtgacgaag

SEQ ID NO: 389 - protein, 206 aa, Artificial Sequence
  Description of Artificial Sequence: Synthetic polypeptide
MLKIYGFNSQNNKKVVYLAKELGLDFEFVKVDLMKRENRSPEFLKMNPVGKVPVLEHDGKYLFESGAICRYIATLVDTPLAPKEKFEYAQVDQWMEFFTNHLGRWLNTLFFEKILRPFLGIGSPVKETCEEAEKFISQQMKVLEGELSKREFIASNELSIADIYAYAYIEQTIALEMDLSEFPNTLKWRDMISKRESIVECQKYFN

SEQ ID NO: 390 - DNA, 618 bp, Artificial Sequence
  Description of Artificial Sequence: Synthetic polynucleotide
atgctgaaaatctacgggttcaactcgcagaacaacaagaaggtcgtctacctggcgaaggagctgggcctggatttcgagttcgtgaaggtcgacctgatgaagcgcgaaaaccgctcgcccgagttcctgaagatgaacccggtcggtaaggtccccgtcctggagcacgatggcaagtacctcttcgagtccggcgcgatctgtcgctacatcgccaccctggtcgataccccgctggcgcccaaggagaagttcgaatacgcccaggtggaccaatggatggagttcttcaccaatcatctgggccggtggctgaacacgctcttcttcgagaaaatcctgcgtccgttcctggggatcggttcgccggtgaaggaaacgtgcgaagaggccgagaagttcatcagccagcagatgaaggtgctggagggcgagctgagcaagcgtgagttcatcgcgtcgaatgagctgagcatcgccgacatctacgcgtatgcctatatcgagcagaccatcgcgctggaaatggacctgtcggagttcccgaatacgctgaagtggcgcgacatgatcagcaagcgcgagtcgatcgtggagtgccagaaatacttcaac

SEQ ID NO: 391 - protein, 214 aa, Artificial Sequence
  Description of Artificial Sequence: Synthetic polypeptide
MVLKLHGSPVSTCTKRVAMVLHEKNVPFEFHPVDLAKGEQKAPEFISRQPFGQVPYIDDDGFILYESRAISEYIATKYADQGTPLVPKDIKDYALFRQGASIETSHFDSHASKLAYERFIKPIYGLQTSEEAAKQAEDLLNAKLDVYEQILSKQKYISGNALTLADLFHLPYGALLALCKCDAIEKRPAVAKWFNELVSRPSWQAVQGGVRGTA

SEQ ID NO: 392 - DNA, 642 bp, Artificial Sequence
  Description of Artificial Sequence: Synthetic polynucleotide
atggtcctgaaactccacgggagccccgtctccacgtgcaccaagcgtgtggcgatggtgctgcacgaaaagaacgtgcccttcgagttccacccggtcgacctggccaagggggagcagaaggcgccggagttcatctcgcgccaaccgttcgggcaggtcccgtacatcgacgacgacgggttcatcctctatgagtcgcgggccatctcggagtacatcgcgaccaaatacgcggaccaaggcaccccgctggtgcccaaagatatcaaggactacgccctgttccgtcagggggcctccatcgagacctcccatttcgacagccatgcctccaaactggcctacgaacgcttcatcaagcccatctatggcctgcagacgtccgaggaggcggccaagcaagccgaggacctgctcaacgccaagctggacgtgtacgagcagatcctgagcaagcagaagtacatcagcggcaacgccctcaccctggcggatctgttccatctcccgtacggggccctgctcgccctgtgtaagtgtgacgccatcgaaaagcgcccggccgtggccaagtggttcaatgagctggtcagccgtcccagctggcaagcggtccaaggtggcgtccgcgggacggcg

SEQ ID NO: 393 - protein, 208 aa, Artificial Sequence
  Description of Artificial Sequence: Synthetic polypeptide
MTIKLYSYWRSSASWRIRIVLNVKGISFETVAVNLLKGEQKEEKYLAINPTALVPTLDIDGELFMNSPAIMELLEDLHPDHPLLPKDPLARAKVRGVMSIICCDIHPVQNLRVIRYAGDAHKDTWAKHFITTGFQGLESVLKKTAGKYCFGDEITLADACLVPQVFNAKRWGVDMTQFPTIAGIDERLAELEAFKKAAPNAQPDAVIE

SEQ ID NO: 394 - DNA, 624 bp, Artificial Sequence
  Description of Artificial Sequence: Synthetic polynucleotide
atgaccatcaagctgtatagctactggcggtcctcggcctcctggcgtatccgcatcgtcctgaacgtcaagggcatcagcttcgaaaccgtcgccgtgaacctgctcaagggggagcagaaggaggaaaagtatctcgccatcaacccgacggccctggtgccgacgctggacatcgacggcgagctcttcatgaactcgccggcgatcatggagctcctcgaagacctgcatcccgatcatccgctgctcccgaaggacccgctggcgcgggccaaggtccgcggcgtcatgtccatcatctgttgcgacatccacccggtgcaaaacctccgggtcatccgttacgccggcgacgcccataaggacacctgggccaagcacttcatcaccaccggcttccaggggctggaatccgtgctgaagaagaccgccggcaagtattgcttcggcgatgagatcaccctggccgacgcgtgcctggtgccgcaagtcttcaatgccaagcgctggggcgtcgatatgacccagttcccgaccatcgccgggatcgatgagcgcctggccgaactggaagcgttcaagaaagccgcgccgaacgcccagcccgacgcggtcatcgag

SEQ ID NO: 395 - protein, 233 aa, Artificial Sequence
  Description of Artificial Sequence: Synthetic polypeptide
MAGGGDELKLLGMWASPFALRAKLALSFKGLSYEYVEEDLKNKSELLLTSNPVHKKVPVLIHNGKPVCESQVIVQYIDEAFPDAGVPLLPSDPYDRAVARFWAAYIDDKLLKSWLQASMCKTEQEKAAAMKETFAAVANLEAAFKECSKGKPFFGGDAVGYVDVTLGAVIGFVRVGEAVHGMRLFDASRSPLLDAWLDRFAALDAAKAVLPDTGRLAEYAKMKQAEWAAAATN

SEQ ID NO: 396 - DNA, 699 bp, Artificial Sequence
  Description of Artificial Sequence: Synthetic polynucleotide
atggccggtgggggcgatgaactcaaactcctgggcatgtgggcctcccccttcgccctgcgcgcgaagctggcgctgagcttcaaaggcctgtcgtatgagtacgtggaagaggacctgaagaacaagtccgagctcctgctgaccagcaacccggtgcacaagaaggtccccgtcctgatccacaacggcaagccggtgtgcgaatcccaagtgatcgtgcagtacatcgatgaagccttcccggatgcgggcgtcccgctgctgccgtcggacccgtatgaccgtgccgtggcccgcttctgggcggcgtatatcgatgacaagctcctcaagtcctggctgcaggcgtcgatgtgcaagaccgagcaggaaaaggccgccgcgatgaaggaaacgttcgcggccgtggccaatctcgaagccgcgttcaaggagtgttccaagggcaagcccttcttcggcggcgacgccgtcgggtatgtcgacgtgacgctcggcgccgtcatcggtttcgtgcgcgtcggcgaagccgtgcacgggatgcgcctcttcgatgcctcccgctcgccgctgctggatgcctggctcgatcgcttcgcggcgctggatgccgccaaagccgtgctcccggacacgggtcggctggccgagtacgccaagatgaaacaagccgaatgggccgccgccgccaccaat

SEQ ID NO: 397 - protein, 219 aa, Artificial Sequence
  Description of Artificial Sequence: Synthetic polypeptide
MAMKLYGDEMSACVARVLLCLHEKNTEFELVPVNLFACHHKLPSFLSMNPFGKVPALQDDDLTLFESRAITAYIAEKHRDKGTDLTRHEDPKEAAIVKLWSEVEAHHFNPAISAVIHQLIVVPLQGESPNAAIVEENLENLGKILDVYEERLGKTKYLAGDTYTLADLHHVPYTYYFMKTIHAGLINDRPNVKAWWEDLCSRPAFLKVSPGLTVAPTTN

SEQ ID NO: 398 - DNA, 657 bp, Artificial Sequence
  Description of Artificial Sequence: Synthetic polynucleotide
atggccatgaaactctacggcgacgagatgtccgcgtgcgtcgcccgtgtcctcctgtgtctgcatgagaagaatacggagttcgagctggtgccggtgaacctgttcgcgtgccaccacaagctgccctcgttcctgtcgatgaacccgttcggcaaggtcccggcgctccaggacgatgacctgacgctgttcgagtcgcgggcgatcacggcctatatcgcggaaaagcaccgcgataagggcaccgacctcacccgtcacgaggacccgaaggaggccgccatcgtcaagctgtggtcggaggtcgaggcccaccatttcaacccggccatcagcgcggtgatccatcaactgatcgtcgtcccgctgcagggcgaaagcccgaacgccgccatcgtggaggagaacctggagaacctgggcaaaatcctggacgtgtatgaggagcggctgggcaagacgaagtacctggccggcgacacctacaccctcgcggacctgcaccacgtgccgtacacgtactacttcatgaagaccatccatgccggcctcatcaacgaccggcccaacgtgaaggcctggtgggaggacctctgcagccgtcccgcgttcctgaaggtctcgccgggtctcacggtggcgccgaccacgaat

SEQ ID NO: 399 - protein, 208 aa, Artificial Sequence
  Description of Artificial Sequence: Synthetic polypeptide
MKLYELAPTPSARRVSIFLAEKGIVIPRVNVDIRSGENLNPEFKAKSINGRIPLLELDDGNYLCESVAICRYLEEIHPSETSLFGNNPLERAKVEMWQRIIELQGLMVGFQAFRNLTGIYKDRENCIEAWGAESRQRVIDFLPTLDQQLAQSSYVAGDNFTIADITAYVFISFIKNLDILVDDSLPHIQAWFATMAQRPAIVSLNPKN

SEQ ID NO: 400 - DNA, 624 bp, Artificial Sequence
  Description of Artificial Sequence: Synthetic polynucleotide
atgaagctgtacgaactggccccgaccccgtccgcccgccgtgtgagcatcttcctggcggagaagggcatcgtcatcccccgcgtcaatgtcgacatccgctccggggagaacctgaacccggagttcaaagcgaagtccatcaacggtcgcatccccctgctggaactggacgatggtaactacctgtgtgaatccgtcgccatctgtcgctacctggaggaaatccatccctccgagacctcgctcttcggcaacaatccgctggaacgggcgaaggtcgagatgtggcagcgtatcatcgagctgcagggtctgatggtcggcttccaggccttccgcaatctcacgggcatctacaaggaccgcgaaaactgtatcgaggcgtggggcgccgaaagccgccaacgtgtgatcgacttcctccccacgctcgaccaacaactggcccagagctcgtatgtcgccggcgataacttcaccatcgcggacatcaccgcgtacgtcttcatcagcttcatcaagaacctcgacatcctggtcgacgatagcctgccgcatatccaggcgtggttcgcgaccatggcgcaacgccccgccatcgtctcgctcaatccgaaaaac

SEQ ID NO: 401 - protein, 206 aa, Artificial Sequence
  Description of Artificial Sequence: Synthetic polypeptide
MLKLYYATGTCALATYITLEEAGADYTAERLSFKDNQQNSPDYLAINPKGRVPALVTDRGVLTETPAMLAYIAQTFPKAKLAPLDDPFDFAQVQSFNSYLCSTVHINHAHKMRGARWATQESSFADMKAMVPKTMGACFALIEQKMFRGPWVMGDQFTICDPYLYTLSTWLEGDSVDINATPKIADHFKRMSERPAVRKVMDAQKA

SEQ ID NO: 402 - DNA, 618 bp, Artificial Sequence
  Description of Artificial Sequence: Synthetic polynucleotide
atgctgaaactctactacgcgaccggtacctgcgcgctggcgacctacatcaccctggaagaggccggggccgattataccgccgaacgcctgtccttcaaggacaaccagcagaatagcccggactacctcgcgatcaacccgaagggtcgtgtccccgccctggtgaccgatcgtggcgtcctgaccgaaacccccgccatgctggcctacatcgcccagaccttcccgaaagccaagctggcgcccctcgacgacccgttcgacttcgcccaggtccagtcgttcaatagctacctgtgctcgacggtgcacatcaaccacgcgcataagatgcgcggggcgcgttgggcgacccaggagtcctcgttcgccgacatgaaggccatggtccccaagaccatgggggcgtgcttcgccctgatcgagcagaagatgttccgcggtccctgggtcatgggggaccagttcaccatctgcgatccgtatctctacaccctgtccacctggctcgaaggcgatagcgtggatatcaacgcgaccccgaagatcgcggaccatttcaagcggatgtccgagcgcccggccgtccgtaaagtcatggatgcgcagaaggcc

SEQ ID NO: 403 - protein, 210 aa, Artificial Sequence
  Description of Artificial Sequence: Synthetic polypeptide
MLYGYFRSSAAYRVRIALNFKGLDYHYQPVNLLKGEQRSPAYLAINPQGLVPLLDDGGVRIAQSLAICEYLDEAYPDTPRLLPADPAARARVRSLALAIAADIHPLQNTRVGKYLQTEYGKDEEGKAEWIRHWIRTGFDALEKQLAESPSRYAAGDAPTLADVCLLPQVFSARRFGVDLAPYPNIVRVAEALEHLQAFAEAHPSRQPDAM

SEQ ID NO: 404 - DNA, 630 bp, Artificial Sequence
  Description of Artificial Sequence: Synthetic polynucleotide
atgttgtacggctacttccgcagctccgccgcctaccgtgtgcgcatcgccctgaacttcaagggtctcgactatcactaccaaccggtgaacctcctgaagggcgaacagcgcagcccggcctacttggccatcaacccgcagggcctggtgccgttgctggacgacggcggcgtgcgtatcgcgcagtccctggccatctgcgaatatctcgacgaggcgtaccccgacacgccccgcctgctcccggccgaccccgccgcgcgtgcgcgggtccgtagcctggccttggccatcgcggcggacattcatccgctgcaaaacacccgcgtcggcaagtacctgcagacggagtacggtaaggatgaagagggtaaggcggaatggattcgccactggattcgcaccggctttgacgccctcgaaaagcagctggccgaatcgccgtcgcgctacgcggccggtgatgcccccaccctggcggacgtctgcctgctcccgcaagtgttcagcgcccgccgtttcggggtggatctggccccctatcccaatatcgtccgcgtcgccgaagcgttggaacacctgcaagcgttcgccgaggcccatccgtcccgccaacccgacgccatg

SEQ ID NO: 405 - protein, 214 aa, Artificial Sequence
  Description of Artificial Sequence: Synthetic polypeptide
MVLKLHGSPVSTCTKRVAMVLHEKNVPFEFHPVDLAKGEQKAPEFISRQPFGQVPYIDDDGFILYESRAISEYIATKYADQGTPLVPKDIKDYALFRQGASIETSHFDPHASKLAYERFIKPIYGLQTSEEAAKQAEDLLNAKLDVYEQILSKQKYISGNALTLADLFHLPYGALLALCKCDAIEKRPAVAKWFNELVSRPSWQAVQGGVKGTA

SEQ ID NO: 406 - DNA, 642 bp, Artificial Sequence
  Description of Artificial Sequence: Synthetic polynucleotide
atggtcctcaagctgcacgggtccccggtctccacgtgcaccaagcgcgtggccatggtgctgcacgagaagaacgtcccgttcgagttccatcccgtcgacctggcgaaaggcgagcagaaagcgcccgagttcatctcccggcagccgttcgggcaggtcccctacatcgacgacgatgggttcatcctgtacgagagccgtgccatctccgagtacatcgccaccaaatacgccgaccaggggaccccgctggtcccgaaggacatcaaagactacgccctgttccgtcagggggcgagcatcgaaaccagccatttcgacccgcacgcgtccaagctggcctacgagcggttcatcaagccgatctacggcctgcagacctccgaagaggcggcgaagcaagccgaggatctcctcaacgccaagctggacgtgtacgagcagatcctgtcgaagcagaagtacatctccggtaatgccctgaccctcgccgacctcttccacctgccctacggcgccctcctggcgctctgcaagtgtgatgcgatcgaaaagcgtccggccgtcgcgaaatggttcaatgagctggtctcgcgcccgagctggcaagcggtgcagggcggcgtcaagggcaccgcc

SEQ ID NO: 407 - protein, 228 aa, Artificial Sequence
  Description of Artificial Sequence: Synthetic polypeptide
MRVLYHYPLCPFSRKVRMCLAEKKLDFSQEMTNFWEKRPEFTSLNPLGHVPVLVDLNGSTLSDSSAIIEYLEEAYPDRKLYPNDLLGKAESRRLMFWFDSKFAQEVSMVILWEKVIKRMIAKSTGNAGTGPDSNLIRHTKNTLSHHLDYIAWLVDRRNWLAGDHFSVADITAAAHISVIDYFGDINWEKFESVKNWFMRIKSRPTYRGFLSDRVPSMAPATHYAELDF

SEQ ID NO: 408 - DNA, 684 bp, Artificial Sequence
  Description of Artificial Sequence: Synthetic polynucleotide
atgcgggtgctctaccattacccgctctgccccttcagccgtaaagtgcgcatgtgtctcgccgagaagaagctggacttctcgcaggaaatgaccaacttctgggagaagcgccccgagttcaccagcctgaacccgctgggtcatgtgccggtcctggtcgacctgaatgggagcacgctgagcgacagcagcgccatcatcgaatatctggaggaggcgtatcccgatcgcaagctgtacccgaatgacctgctgggtaaggccgaaagccgccggctgatgttctggttcgacagcaagttcgcccaagaagtgtcgatggtcatcctgtgggaaaaagtcatcaagcggatgatcgccaagagcaccggtaatgccggcaccggcccggattccaacctgatccggcacaccaaaaacaccctcagccaccacctggactacatcgcctggctggtcgatcggcgcaattggctggcgggtgaccacttctccgtggccgacatcaccgcggcggcccacatctccgtgatcgactacttcggcgacatcaattgggagaagttcgagagcgtcaagaactggttcatgcgcatcaagagccggcccacctaccgcggcttcctgagcgatcgtgtgccctccatggcgccggcgacccattatgccgaactggacttc

SEQ ID NO: 409 - protein, 217 aa, Artificial Sequence
  Description of Artificial Sequence: Synthetic polypeptide
MALKLHGIPMSTCTTRVLTCLHEKGLDFELVPVNLFAGEHKQPPFLAKNPFGQIPVLEDGDLTLFESRAITAYLAEKYKETGCDLLRHNDLKEAALVKVWLEVESQQYHPAIYQIVYQFFVLPLQGKTADQAIIDVNLEKLGKVLDVYEARLGTTKCLAGDFYSLADLHHLSYTYYFMKTPWASLINSRPNVKAWWEDISSRPAFKKVAEGMTFGEK

SEQ ID NO: 410 - DNA, 651 bp, Artificial Sequence
  Description of Artificial Sequence: Synthetic polynucleotide
atggccctgaaactgcacggcatcccgatgtcgacctgcaccacgcgcgtcctcacctgcctccacgaaaaggggctggacttcgaactggtgcccgtcaacctgttcgccggtgagcacaagcagccgcccttcctggccaagaatccgttcggccagatcccggtgctggaagacggcgacctcaccctgttcgaaagccgcgccatcaccgcctacctcgccgagaagtataaggagaccggctgcgacctgctgcggcataacgacctcaaagaagccgccctggtcaaggtctggctcgaagtggagagccagcagtaccaccccgcgatctatcagatcgtgtaccagttcttcgtcctgccgctccagggcaagaccgccgaccaggccatcatcgacgtcaacctggagaagctgggcaaggtcctggatgtgtacgaagcccgtctgggcaccaccaagtgcctggcgggcgacttctattcgctggccgacctccaccatctgtcctacacctactacttcatgaagaccccgtgggcgtcgctcatcaattcccgcccgaacgtcaaagcctggtgggaggacatctcgtcgcgtccggcgttcaagaaagtggcggaaggcatgaccttcggcgagaag

SEQ ID NO: 411 - protein, 217 aa, Artificial Sequence
  Description of Artificial Sequence: Synthetic polypeptide
MALKLHGIPMSTCTTRVLTCLHEKGLDFELVPVNLFAGEHKQPPFLAKNPFGQIPVLEDGDFTLFESRAITAYLAEKYKETGCDLLRHNDLKEAALVKVWLEVESQHYYPAIYQIVYQFFALPLQGKTADQAIIDVNLEKLGKVLDVYEARLGTTKCLAGDFYSLADLHHLSYTYYFMKTPWASLINSRPNVKAWWDDISSRPAFKKVAEGMTFGEK

SEQ ID NO: 412 - DNA, 651 bp, Artificial Sequence
  Description of Artificial Sequence: Synthetic polynucleotide
atggccctgaagctccatggcatcccgatgagcacctgcacgacccgtgtgctcacctgcctgcatgaaaagggcctcgatttcgagctggtgccggtcaacctgttcgcgggcgagcacaagcaacccccgttcctggcgaagaatccgttcggccaaatccccgtcctggaggacggggacttcacgctgttcgaaagccgggccatcaccgcctatctggcggagaagtataaggagaccgggtgtgacctgctgcgccacaacgacctgaaggaggcggccctggtcaaggtgtggctggaggtcgaatcccaacactactacccggcgatctatcaaatcgtgtaccagttcttcgccctccccctgcagggcaagaccgccgaccaggccatcatcgacgtcaacctggagaagctgggcaaagtgctcgacgtgtatgaagcgcgtctcggcacgaccaagtgtctggccggcgatttctacagcctcgccgacctccaccacctgtcctacacgtactacttcatgaagaccccgtgggcctcgctgatcaactcgcggccgaacgtcaaggcctggtgggacgatatcagctcgcgcccggccttcaaaaaggtcgcggagggcatgaccttcggggaaaag

SEQ ID NO: 413 - protein, 234 aa, Artificial Sequence
  Description of Artificial Sequence: Synthetic polypeptide
MADEIILLDFWPSMFGMRVRVALAEKGLKYEYREEDLWNKSPLLLEMNPVHKKIPVLIHNGKPICESLIIVQYIDEVWCDKSPLLPSDPYQRAQARFWADYIDKKQGEYINFFDFIVFHSSMNLGRKIWSTKGEEQETAKKEFIECLKLLEGELGEKPYFGGEKIGFVDVALVTFSCWFYAYETFGNFSIEAECPKLIAWTKRCMEKESVSSSLEDPHKVHGFIMGMRKRFGIE

SEQ ID NO: 414 - DNA, 702 bp, Artificial Sequence
  Description of Artificial Sequence: Synthetic polynucleotide
atggcggacgaaatcatcctgctggacttctggccgtccatgttcgggatgcgtgtgcgcgtggcgctggcggagaagggcctgaagtatgagtaccgcgaggaagacctgtggaacaagtcgccgctgctcctggagatgaatccggtccacaagaagatcccggtgctgatccacaacgggaagccgatctgtgagtccctgatcatcgtccagtatatcgatgaagtctggtgcgacaagagcccgctcctcccgagcgacccctatcaacgggcgcaagcccggttctgggcggattacatcgacaagaagcagggcgagtacatcaacttcttcgacttcatcgtgttccactcctcgatgaacctgggccggaagatctggagcaccaagggggaagagcaagagaccgccaagaaggagttcatcgagtgcctcaagctcctggagggcgagctcggtgaaaagccgtacttcggcggggagaagatcggtttcgtggacgtggccctcgtcacgttctcgtgctggttctacgcgtacgagaccttcggcaatttcagcatcgaagccgagtgcccgaagctgatcgcgtggaccaagcggtgcatggaaaaggaatccgtgagctccagcctggaggacccccataaagtgcatggcttcatcatgggcatgcggaaacgcttcggtatcgag

SEQ ID NO: 415 - protein, 225 aa, Artificial Sequence
  Description of Artificial Sequence: Synthetic polypeptide
MAEEVKIFRTWSSPFALRVIWALKLKGIEYETIYEDLSSKSPLLVQYNPVHKKVPVLVHNGKAISESLVILEYMDETWKQYPLLPQDPHERARARFWAKFGDDKVLQSIFYGTFLKQGKELEEGLASATENLQCLEEELKGKKFFGGDNIGVVDLALGWLAHYNSVFEEIIGLKIIDQEKFPLLSEWKQAFASVPIIQENWPPRDKLVAKFVATRQSRLAEENTK

SEQ ID NO: 416 - DNA, 675 bp, Artificial Sequence
  Description of Artificial Sequence: Synthetic polynucleotide
atggcggaagaagtcaagatcttccgtacgtggagcagccccttcgccctgcgcgtcatctgggcgctgaagctgaagggcatcgagtatgagaccatctacgaggatctctcctcgaagagccccctgctggtgcagtacaaccccgtgcacaagaaggtgcccgtcctcgtccataacggtaaagccatcagcgagagcctggtgatcctggagtacatggatgagacgtggaagcaatacccgctgctgccgcaggacccgcatgaacgcgcccgtgcgcggttctgggccaagttcggcgacgacaaagtcctgcagtcgatcttctacggcaccttcctcaagcaggggaaggagctcgaagagggcctggcctcggccacggagaacctccagtgtctggaagaggagctgaaggggaagaagttcttcggcggcgacaacatcggcgtcgtggacctcgccctcggctggctggcccattacaactccgtcttcgaggaaatcatcggcctgaagatcatcgaccaagagaagttcccgctcctgtcggagtggaagcaggcgttcgcgtccgtgccgatcatccaggaaaattggcccccgcgcgataagctggtcgcgaagttcgtcgccacccgccagtcccgtctcgcggaggaaaacacgaag

SEQ ID NO: 417 - protein, 223 aa, Artificial Sequence
  Description of Artificial Sequence: Synthetic polypeptide
MSQLTLFTYSPSNNCMRVEIVLKEKNLPYERKEVDIFKGEQKTPQFLAMNPRGTVPCLTHGSLVLRDSMAALQYLDMAFPDQVPLTPHSPAEMAACIQYIHEFEQSFNPKNVAYQVFFQGQKKEQLGAEIEALSKEVAIWDGYLEGKEYLVGNFTLADIAVFPLVAQLHLWLGLNLDKYPNMKKWYFKMKERHSVKDHPYFECAERVDQIFGTIAKDRAVLKD

SEQ ID NO: 418 - DNA, 669 bp, Artificial Sequence
  Description of Artificial Sequence: Synthetic polynucleotide
atgtcccagctgaccctgttcacctactcgccgtccaacaactgcatgcgcgtggagatcgtgctgaaggagaagaacctgccctacgagcgcaaggaggtcgacatcttcaagggcgagcagaagacgccccagttcctggcgatgaacccccgtggtaccgtcccgtgtctgacgcacggcagcctggtcctccgcgacagcatggccgcgctgcagtacctggacatggccttcccggaccaagtccccctcaccccgcatagccccgccgaaatggccgcctgcatccagtacatccacgagttcgaacagtcgttcaacccgaagaacgtggcctaccaggtcttcttccagggccagaagaaggagcaactcggcgccgaaatcgaggccctgagcaaggaagtggccatctgggatggctacctggaggggaaggaatatctggtcggcaacttcaccctggccgatatcgccgtcttcccgctcgtcgcccagctgcatctgtggctgggcctgaacctggacaaatatcccaacatgaagaagtggtacttcaagatgaaggagcggcatagcgtcaaggatcacccgtacttcgagtgcgcggaacgcgtggaccagatcttcggtacgatcgccaaagaccgcgccgtcctcaaagac

SEQ ID NO: 419 - protein, 214 aa, Artificial Sequence
  Description of Artificial Sequence: Synthetic polypeptide
MVLKLHGSPVSTCTKRVAMVLHEKNVPFEFHPVDLAKGEQKAPEFISRQPFGQVPYIDDDGFILYESRAISEYIATKYADQGTPLVPKDIKDYALFRQGASIETSHFDSHASKLAYERFIKPIYGLQTSEEAAKQAEDLLNAKLDVYEQILSKQKYISGNALTLADLFHLPYGALLALCKCDAIEKRPAVAKWFNELVSRPSWQAVQGGVKGTA

SEQ ID NO: 420 - DNA, 642 bp, Artificial Sequence
  Description of Artificial Sequence: Synthetic polynucleotide
atggtgctgaagctgcacggttccccggtgtccacctgtaccaagcgtgtggccatggtcctgcacgagaagaacgtcccgttcgagttccaccccgtcgatctcgccaagggggaacaaaaggcgccggagttcatctcccgccagcccttcggccaagtcccctacatcgacgacgatggcttcatcctgtatgagtcccgtgcgatcagcgaatacatcgcgaccaagtacgccgaccagggcacgcccctcgtgccgaaggatatcaaggattatgccctgttccgccagggcgcgagcatcgaaaccagccatttcgacagccacgcctccaagctggcctacgaacgcttcatcaagccgatctatggcctccagacctcggaggaagcggccaagcaagccgaggacctgctcaacgcgaagctggacgtgtacgaacagatcctgtcgaagcagaagtacatcagcgggaacgccctcaccctggccgacctgttccatctgccgtatggggcgctcctcgccctctgcaaatgcgatgccatcgagaaacgtcccgccgtcgccaaatggttcaacgaactggtctcccgtccctcgtggcaggccgtccaagggggcgtgaagggcaccgcc

SEQ ID NO: 421 - protein, 379 aa, Artificial Sequence
  Description of Artificial Sequence: Synthetic polypeptide
MFYRRLKRILPVVFALRQRHLAFLVCAAANEVSESCDQRGDSLVKCTAKNQFVNLGNMRKGAEGFKLEVSDGLLLYYDRFSFYSQKVVMALHEKNLAFDSKIVNLIKNEQYQPWYLFLNPRGEVPVLQDTGKIIPDSARIIDYLEDNFSNGDTPRLIPMDQGAEVRQRVTHFRHILQKAPAGMLTTGAMLNQHLLKNPKSPFFAPIRKALANAEKNSGKHLREYAEKNPEAKEILLKKASVREEQYKQLSDEKNFRDVLNQVHTILDEIEAELEKHKGDKEDWWLCSDRFTIADVELTILLIRISQLGLEHIFWSSGKRPCIEKYYERVKARDSFKKTVPGTLVLLKTILMSQAPIVFGVVAAVALVVGGAIIAKKYIA

SEQ ID NO: 422 - DNA, 1137 bp, Artificial Sequence
  Description of Artificial Sequence: Synthetic polynucleotide
atgttctaccgtcgcctgaagcgcatcctgccggtcgtgttcgccctgcggcaacgccacctcgcgttcctggtgtgtgccgcggcgaacgaagtcagcgagtcgtgtgatcaacgcggcgacagcctggtgaagtgcaccgccaagaatcagttcgtgaacctgggcaacatgcgcaagggggccgaaggcttcaagctggaggtcagcgacggcctgctgctctactatgaccgcttcagcttctactcgcagaaggtggtcatggccctccacgagaagaacctcgccttcgactccaagatcgtcaacctgatcaagaacgaacaataccagccctggtacctgttcctcaacccgcggggcgaggtcccggtcctccaggacaccgggaaaatcatcccggactccgcccgcatcatcgactacctggaagacaacttctccaacggggacaccccgcgcctcatcccgatggatcagggggcggaagtccgtcagcgggtcacccacttccgccatatcctccagaaggcgccggcgggcatgctcacgaccggcgccatgctgaaccagcatctgctgaaaaacccgaagtcgccgttcttcgcccccatccggaaggccctggcgaacgccgaaaagaactccggcaagcatctgcgcgagtatgccgaaaagaatcccgaggcgaaggagatcctgctgaagaaggcgagcgtgcgggaggagcaatacaagcagctgtccgacgagaagaacttccgcgacgtgctgaaccaggtgcataccatcctcgacgaaatcgaagccgagctggagaagcataagggcgacaaggaagactggtggctgtgcagcgatcgcttcaccatcgcggacgtggaactcaccatcctgctgatccgtatcagccagctcgggctggagcacatcttctggagctccgggaaacgtccgtgcatcgaaaagtactacgagcgtgtcaaggcccgtgacagcttcaagaagaccgtgccggggaccctggtgctcctgaaaaccatcctgatgagccaggcgccgatcgtgttcggcgtcgtcgcggccgtcgcgctggtggtgggtggtgcgatcatcgcgaagaagtatatcgcc

SEQ ID NO: 423 - protein, 269 aa, Artificial Sequence
  Description of Artificial Sequence: Synthetic polypeptide
MPEIATTRDDIRDLAGLHLWHAGLSNCSQRVRLVLEEKGLAWTSHPVDLLNFEHATPEYQAIHPKGLVPALVHDGRTIIDSNDIIEHLDGAFPAIRLSRSRDRRWLDLADGCQSALRTISHEILLKEVRILDAARLEDFGRKHRNRDFHEFLHRFATTGFDDEALTGCARVLSSALDQIERQLRETRFLAGDDIALDDFSWATNIHRLRLMDWPLAAHPRTSDWYFEIEARDSFKAAVVAFEENVPAPSARARGRLENVLRSVGLQSPG

SEQ ID NO: 424 - DNA, 807 bp, Artificial Sequence
  Description of Artificial Sequence: Synthetic polynucleotide
atgccggagatcgcgacgacccgggatgacatccgggatctggccggcctgcatctgtggcacgcgggtctgagcaattgcagccagcgggtccgtctggtgctggaggagaagggcctggcctggaccagccatccggtcgacctgctcaatttcgagcacgcgaccccggagtatcaggcgatccacccgaagggcctggtgcccgccctggtccacgacggtcggaccatcatcgacagcaacgacatcatcgagcatctggacggcgccttcccggcgatccggctctcccgctcccgtgatcggcgctggctggacctggccgacgggtgccaaagcgcgctgcgcaccatcagccacgaaatcctcctcaaagaggtccgcatcctcgatgccgcgcgtctggaggacttcggccgcaaacaccgcaaccgcgacttccacgagttcctgcaccgcttcgcgacgaccggcttcgacgacgaggccctgaccggttgtgcgcgcgtgctgagcagcgccctggaccagatcgagcgccagctgcgggaaacccgcttcctggccggtgacgacatcgccctggacgacttcagctgggcgaccaacatccaccgcctccgcctgatggactggccgctggccgcccacccgcggacgtccgactggtacttcgagatcgaggcccgggactccttcaaagccgcggtcgtcgccttcgaggagaacgtccccgccccgtcggcccgcgcccggggccgcctcgaaaatgtcctccgtagcgtggggctgcagtcgccgggc

SEQ ID NO: 425 - protein, 207 aa, Artificial Sequence
  Description of Artificial Sequence: Synthetic polypeptide
MITLYGIPRSRSLRVSWTLEELGLDWQYHYINFAKGDSRDPAFLAVNPCGKVPALVDDGFALTESAAIVLYLAEKYGQGKLLPKVGTHESAQHHKWVSFIISELEQPLWSIGKHKFALPEEQRLPAMLSVAKWEFDKAAAIAEKWLPESDFLLGDELSIADILLGHTLLWATRFEQDIPPKLTAYRDRITARPAMAKGLAKEEAGAA

SEQ ID NO: 426 - DNA, 621 bp, Artificial Sequence
  Description of Artificial Sequence: Synthetic polynucleotide
atgatcaccctctacggcatcccgcgttcgcgctcgctgcgtgtctcctggaccctggaagagctgggcctggactggcagtaccattacatcaacttcgccaagggcgattcgcgggaccccgccttcctggcggtcaatccgtgtggcaaggtgcccgcgctcgtcgatgacggcttcgcgctgaccgagagcgccgccatcgtgctctacctggccgaaaagtacggccaagggaagctgctgccgaaggtcgggacccatgagagcgcgcagcaccacaagtgggtcagcttcatcatctccgagctggagcagccgctgtggagcatcgggaagcacaagttcgcgctccccgaagaacagcgtctgccggcgatgctctccgtggcgaagtgggagttcgataaggccgccgcgatcgccgaaaagtggctgccggaatccgatttcctgctgggcgacgaactgtcgatcgcggacatcctgctcggccacaccctcctctgggccacccgcttcgagcaagatatcccgccgaaactcaccgcctatcgggaccgcatcaccgcccgcccggccatggcgaagggcctggccaaagaagaagcgggggcggcc

SEQ ID NO: 427 - protein, 206 aa, Artificial Sequence
  Description of Artificial Sequence: Synthetic polypeptide
MKVYEFKGFPNPARVRIALAEKGLTEAVEFVSVDVPNGEHKQSEFLAKNPSGTVPVLELDDGTTIAECTAITEYLDHTSGETTLTGRTPKERAMIHMMQRRAEAGLLDAVGLYFHHATPGLGPDIEAYQCSEWGEHQRQKAIAGMHYLNDVLAQNTYLAGEQFSMADITAFAGLVFADFAKIEIPAECGHLKAWRERVSQRPSVAG

SEQ ID NO: 428 - DNA, 618 bp, Artificial Sequence
  Description of Artificial Sequence: Synthetic polynucleotide
atgaaggtctacgagttcaagggcttccccaatccggcccgcgtgcgcatcgcgctggcggaaaaaggcctgaccgaagccgtcgagttcgtctccgtcgacgtgccgaatggcgagcacaagcagtcggagttcctggccaaaaatccgagcgggaccgtgccggtgctggaactggacgacggcaccaccatcgcggagtgtaccgccatcaccgaatacctcgaccatacgtcgggtgagaccaccctgaccgggcgcaccccgaaggaacgcgccatgatccacatgatgcagcgccgggcggaagccggtctcctggatgcggtcggcctctatttccaccatgccacgccgggcctgggccccgacatcgaggcgtaccaatgctccgagtggggcgagcatcaacgtcagaaggcgatcgcgggcatgcactatctcaacgacgtcctggcccaaaacacctacctggccggcgagcagttcagcatggccgacatcaccgccttcgccgggctcgtcttcgccgacttcgcgaagatcgagatcccggccgagtgcggtcatctcaaggcctggcgcgagcgcgtctcccagcgccccagcgtcgccggc

SEQ ID NO: 429 - protein, 205 aa, Artificial Sequence
  Description of Artificial Sequence: Synthetic polypeptide
MKIYGHPMSTCTRKVLTVLAEKGQEAQFVLVDLMKGAHKQPEHLARHPFGVIPVLEDEDFTLYESRAIMRYLDHKLPGAPLTPTELRARALMDQWLSVEQSYFATPAVKIVFQRVFLPMQGKPGDEAIVDASKAEVSKALDVIEKALAGHEYLAGSSYSLADISWMPYLQCLVVSKLGDLITDRPNVGAWWKRISERPAWVKVSS

SEQ ID NO: 430 - DNA, 615 bp, Artificial Sequence
  Description of Artificial Sequence: Synthetic polynucleotide
atgaagatctacgggcaccccatgtccacgtgcacgcgcaaggtcctgaccgtcctggccgaaaagggtcaggaggcgcagttcgtgctggtcgacctgatgaagggggcccacaaacaacccgaacacctggcccgccatccgttcggggtgatccccgtcctggaggacgaggacttcacgctgtacgagtcccgcgccatcatgcggtatctggaccataagctgccgggtgccccgctgacgccgaccgagctgcgtgcccgcgcgctgatggaccaatggctgtcggtggaacaatcctacttcgcgaccccggcggtgaagatcgtgttccagcgtgtcttcctgcccatgcagggcaagcccggcgacgaggccatcgtggatgccagcaaagccgaggtctcgaaggccctggacgtgatcgaaaaggcgctggccggccatgaatacctggcgggtagcagctattcgctcgcggacatctcgtggatgccgtacctccagtgcctcgtggtcagcaagctcggcgacctgatcacggaccgtccgaatgtcggcgcctggtggaagcgcatctcggaacgtcccgcctgggtgaaagtctcgtcg

SEQ ID NO: 431 - protein, 214 aa, Artificial Sequence
  Description of Artificial Sequence: Synthetic polypeptide
MKIHDIPGFPNPLRVRIALAEKGLADQVTFVNVDLPGAEHKQDAFLALNPTGTVPVLELDDGLCISECTAITEYLDNLDGDPILTGRTPREKGVIHMMQKRAESELIDAIGGYFHHATPGLGPVLQAYKSPDWVGREDWGRQQGDRAIAGMRYFDKVLRDQPYVAGDQFSMADITVLEGLVFAGYAKLAVPEDCTALIAWNARLQERPSVKTPA

SEQ ID NO: 432 - DNA, 642 bp, Artificial Sequence
  Description of Artificial Sequence: Synthetic polynucleotide
atgaagatccacgacatcccgggcttcccgaatcccctccgggtccgcatcgccctggccgaaaagggcctggcggaccaggtgaccttcgtcaacgtggacctgccgggcgcggaacacaagcaggacgccttcctcgccctcaaccccacgggcaccgtccccgtgctggaactggacgacggcctgtgcatctcggagtgcaccgccatcaccgagtacctggacaatctggacggcgacccgatcctgacgggtcgcacgccccgcgagaagggggtgatccacatgatgcaaaaacgcgccgagtcggagctgatcgacgccatcgggggctacttccatcatgccacccccggcctgggcccggtgctgcaggcgtataaaagcccggattgggtcggccgtgaggactggggtcgccagcaaggcgaccgggcgatcgccggcatgcgctacttcgacaaggtgctgcgcgaccagccgtacgtcgcgggcgaccaattcagcatggccgatatcaccgtgctggaaggcctggtgttcgcgggctatgccaagctggccgtcccggaagattgcaccgcgctgatcgcgtggaatgcgcgtctccaggaacgcccgtcggtcaagacgcccgcc

SEQ ID NO: 433 - protein, 207 aa, Artificial Sequence
  Description of Artificial Sequence: Synthetic polypeptide
MIKLYNFPKSGHAHRIELMLSLLNLPTELVFVDLAKGAHKQPEFLALNPLGQVPVIDDNGTVIADSNAILVYLASTYDKAGHWLPHDPVSAARVQRWLTTAAGPLAFGPAAARLVTVFGASFNTDEVIGRAHALLKVMDRELAESPFLVGDQPTIADVANYSYIAHAPEGNVSLEPYPNVRAWLARIEALPGFVAMPRTAVGLQANV

SEQ ID NO: 434 - DNA, 621 bp, Artificial Sequence
  Description of Artificial Sequence: Synthetic polynucleotide
atgatcaaactgtacaacttccccaagtcgggtcacgcccaccggatcgaactcatgctgtcgctcctgaacctgccgaccgagctcgtgttcgtcgacctggccaagggcgcgcacaagcagcccgagttcctcgccctgaaccccctgggtcaagtccccgtcatcgacgacaacggcaccgtcatcgccgacagcaacgcgatcctggtgtatctggcctcgacctatgacaaggcggggcactggctgccgcacgatccggtgtccgcggcccgggtccaacgctggctgaccaccgccgcgggtccgctcgccttcggtccggccgccgcccgtctggtgacggtcttcggcgcgagcttcaacacggacgaggtgatcggccgggcgcacgccctgctcaaagtcatggaccgtgagctggcggagtccccgttcctggtgggcgaccaacccaccatcgccgacgtggcgaactactcctacatcgcccatgcgccggagggtaacgtgagcctggagccgtaccccaacgtgcgcgcctggctcgcccgcatcgaagcgctgcccggtttcgtcgccatgccgcgcaccgccgtggggctgcaggccaatgtg

SEQ ID NO: 435 - protein, 237 aa, Artificial Sequence
  Description of Artificial Sequence: Synthetic polypeptide
MSATCVINGWERPEKTPMLKLYHLPISFNSRRVWIALLEKGLSFELIPMKLNGDQLTPEFLALNPFHHIPVLVDEAFSLFESLAILDYLEAKYPTPSLVPSDPQGLGTVKMINLVTLNELLPATTPLIQHSMGFITLDEQRIANTKEKVAVVLNFFETSLGDRSYIVGNTLTLADIVAGTMVGFLPQMGVSLSAYPQLTAWTKQLSQRESWQQTEPQPEEIDKFRETMKKLMAQRGS

SEQ ID NO: 436 - DNA, 711 bp, Artificial Sequence
  Description of Artificial Sequence: Synthetic polynucleotide
atgtccgcgacctgtgtcatcaacgggtgggaacgcccggagaagacccccatgctgaagctgtatcacctgccgatctcgttcaacagccgtcgggtctggatcgcgctgctcgaaaagggcctctcgttcgagctgatcccgatgaagctgaacggcgaccagctgacccccgagttcctcgcgctcaacccgttccaccacatccccgtgctcgtcgatgaggcgttcagcctcttcgagtcgctcgccatcctggactatctggaagccaagtatccgacgccgtcgctggtgccgtccgacccccaaggtctgggtaccgtcaagatgatcaacctggtcacgctgaatgagctcctgccggccaccaccccgctgatccagcactcgatgggcttcatcacgctggacgagcaacgcatcgcgaacaccaaggagaaggtcgccgtggtcctgaacttcttcgagaccagcctgggcgaccggtcctatatcgtgggcaacaccctgaccctggcggacatcgtggccggtaccatggtcgggttcctcccgcaaatgggggtcagcctgtcggcgtacccccagctgaccgcctggacgaagcagctcagccaacgggagtcctggcagcagaccgagccgcaaccggaggagatcgataagttccgcgagacgatgaagaagctgatggcgcagcgcggctcg

SEQ ID NO: 437 - protein, 216 aa, Artificial Sequence
  Description of Artificial Sequence: Synthetic polypeptide
MQQTNPPAVPARPLVLYRSPLSGHAHRAELMLGLLGLPYRLVDVDLRGGEQRSEAFLRLNPFGQVPVLDDDGVVLADSNAILVYLATRYDDGRWLPRDPVGAAGVQRWLSVAAGEIAFGPAAARLGVLFGRPVPMEDAVARAQRLFTLMESVLAAGAFLAADHATIADVAAYSYIARAEEGNVPLAPYPALNAWLRRVEALPGFVPMLVSKPSLAA

SEQ ID NO: 438 - DNA, 648 bp, Artificial Sequence
  Description of Artificial Sequence: Synthetic polynucleotide
atgcaacaaaccaatccgcccgcggtcccggcccgcccgctcgtcctgtaccgctcgcccctgagcgggcacgcgcatcgcgccgagctgatgctgggcctgctcggtctgccctaccgtctcgtggacgtggacctgcggggcggggaacagcgcagcgaggccttcctgcgcctcaaccccttcggccaagtcccggtgctggatgacgacggggtggtcctggccgacagcaacgcgatcctcgtgtacctggcgacccgctacgacgatggtcggtggctgccccgcgatccggtgggcgcggccggtgtccagcggtggctcagcgtggcggccggtgaaatcgcgttcgggcccgccgccgcgcgtctgggggtcctcttcgggcgtcccgtcccgatggaagacgccgtcgcccgggcccagcgcctcttcaccctgatggaatccgtgctcgccgccggcgccttcctggcggccgatcacgccaccatcgccgacgtcgccgcctattcctacatcgcgcgggccgaagagggtaacgtgccgctggcgccgtaccccgccctcaacgcctggctgcgccgggtcgaggccctgcccgggttcgtccccatgctggtctcgaagccctcgctggccgcc

SEQ ID NO: 439 - protein, 217 aa, Artificial Sequence
  Description of Artificial Sequence: Synthetic polypeptide
MPLILHQHPLSSYCWKAKIALYEAGLPFEARLVDFGDAEGRAAFQALSPMGKMPLLEDTDRGRLVPETTVIIEYLQAHHAPSAGLIPADAEAALRVRLLDRVFDSYVMDPTSRIVAENFRGGDDPVGVAQADATLARSYGWLERELAGRTWAAGEAFTLADCAAAPALFYADKVAPFRDSHPTLGAYLDRLEARPSFARTLQEAQPVMHMFPGRKAA

SEQ ID NO: 440 - DNA, 651 bp, Artificial Sequence
  Description of Artificial Sequence: Synthetic polynucleotide
atgcccctgatcctgcaccagcacccgctgagctcctactgctggaaggccaaaatcgccctgtacgaggccggcctgcccttcgaagcccggctcgtggatttcggtgacgccgagggccgcgccgccttccaggccctgtccccgatgggtaagatgcccctgctggaggacaccgaccgcggccggctcgtcccggaaaccaccgtcatcatcgagtacctgcaggcccaccacgcgccgtccgccggcctcatccccgccgatgcggaagccgccctccgcgtgcgcctgctggaccgtgtgttcgacagctacgtcatggacccgacgtcgcgcatcgtcgccgaaaacttccgcggcggtgacgacccggtcggcgtggcccaagcggacgcgaccctggcccggtcgtacggctggctcgaacgcgaactcgccggtcgcacgtgggccgcgggtgaggccttcacgctggccgactgtgccgccgcgccggccctcttctacgccgacaaagtcgcgccgttccgcgatagccacccgaccctcggcgcctacctggaccgtctggaggcgcgcccgtcgttcgcccgcaccctgcaagaggcgcaaccggtcatgcacatgttcccgggtcgcaaggcggcc

SEQ ID NO: 441 - protein, 204 aa, Artificial Sequence
  Description of Artificial Sequence: Synthetic polypeptide
MKLYYSPGACSLSPHIILNEGGFSFDRERVDLASKKTETGADYAAINPDGYVPALLLDDGQVLTEGPAIIQYLADRVPEKKLAPPLGTLERYRLMQWLNFISTELHKGFSPLFHPQAPKEWKTVVAAQLGRRLSTVSRQLEGKDWLLGEGFTVADAYLFTVLGWGRHVGIDVEQWPVLQAYQGRVSTRPAVQSALKAEGLLQDT

SEQ ID NO: 442 - DNA, 612 bp, Artificial Sequence
  Description of Artificial Sequence: Synthetic polynucleotide
atgaaactgtactactcccccggcgcgtgcagcctgagcccgcacatcatcctcaacgaaggcggcttctccttcgaccgggagcgtgtggacctggcctcgaagaagaccgaaaccggcgccgattacgccgccatcaacccggacgggtacgtgccggccctgctgctggacgacggccaggtcctgaccgagggtccggccatcatccagtacctcgccgaccgggtgcccgagaagaaactggccccgccgctgggcaccctggagcgctaccgcctgatgcagtggctgaacttcatcagcacggagctccacaaggggttctcgccgctcttccacccgcaggcgccgaaggagtggaaaaccgtggtcgccgcgcagctgggccgtcgcctgagcacggtcagccgccagctcgaagggaaagactggctcctgggcgagggcttcacggtggccgacgcctacctgttcaccgtcctgggttggggccgccatgtcggcatcgacgtcgagcagtggcccgtcctgcaagcctaccagggccgtgtgtcgacccgccccgcggtccagagcgcgctgaaggccgagggcctcctccaggacacg

SEQ ID NO: 443 - protein, 243 aa, Artificial Sequence
  Description of Artificial Sequence: Synthetic polypeptide
MLKLYYARPSVYARPVWLALLEKQLPFELIPVDLSGEQFEPEFLSLNPFSHVPVLVDGDFRVIESLAILDYLEARYPDRPLLPTDPTALAKVRMAQLVTLNELVPAVFKLILHHDPRSTPDHRNPSETVELEYAQMRAINTLNFLETLLGNSPYFAGEQLTLAEIVAGTLVHRLPDLGIPLISYPGLHNWSRQLLSRPTWQQIELHPEEWDNLKRRMRVMPKIWERRRRHRTHALSQVQRVGK

SEQ ID NO: 444 - DNA, 729 bp, Artificial Sequence
  Description of Artificial Sequence: Synthetic polynucleotide
atgctcaagctctactacgcccgtcccagcgtctatgcccgtcccgtgtggctcgcgctgctggagaaacagctgccgttcgagctgatcccggtggacctgtccggcgagcaattcgaacccgagttcctgagcctgaatccgttcagccacgtccccgtcctggtcgacggtgacttccgcgtgatcgaaagcctggcgatcctggactatctggaggcgcgctatcccgaccggccgctgctgccgaccgatccgaccgccctcgcgaaggtgcggatggcgcagctggtcaccctgaatgaactggtcccggcggtgttcaagctcatcctgcatcacgacccgcgctccacgccggaccaccgcaacccctcggagacggtcgagctggaatacgcgcagatgcgcgcgatcaacaccctgaacttcctggagacgctgctcgggaacagcccctatttcgccggcgagcaactgaccctggccgaaatcgtggcggggacgctggtgcatcgcctgccggacctcggtatcccgctgatcagctacccgggcctccataactggtcgcggcagctcctgtcccggcccacctggcagcaaatcgagctccacccggaggaatgggacaacctgaagcggcgcatgcgcgtcatgcccaagatctgggagcgtcgccgccggcatcgtacccacgccctgagccaggtccagcgcgtgggcaaa

SEQ ID NO: 445 - protein, 206 aa, Artificial Sequence
  Description of Artificial Sequence: Synthetic polypeptide
MPTLYFATGTCALASLIALEESGLAYEARPISFANGEQRSPEYLAINPKGRVPALITDKGVITENVAILAYVAQIAPQAKLAPLDNPFEFARMQAFNSYLASTVHINHAHKMRGHRWTDDASAIEAMKAKVPQTMSESFALIEETMLEGPWVMGEQYTVADGYLFTLTRWLPGDGVDLARFEKVSAHHARMLERPAVQRALAAQQS

SEQ ID NO: 446 - DNA, 618 bp, Artificial Sequence
  Description of Artificial Sequence: Synthetic polynucleotide
atgcccaccctgtacttcgccaccggcacgtgtgccctcgcgtcgctgatcgcgctggaggaatccggtctcgcctacgaggcccgtccgatctccttcgcgaatggcgagcaacgcagcccggagtacctcgcgatcaacccgaaaggtcgcgtccccgccctgatcaccgacaagggggtcatcaccgagaacgtggccatcctggcgtacgtcgcccagatcgcgccccaagcgaaactggcgccgctcgacaatccgttcgagttcgcccggatgcaggccttcaactcgtacctggccagcaccgtgcacatcaaccacgcccacaagatgcgcgggcaccgctggacggacgacgcgtccgcgatcgaggccatgaaagccaaggtgccgcagaccatgtcggagagcttcgcgctgatcgaagagaccatgctggagggcccgtgggtcatgggcgaacagtatacggtcgcggatgggtatctcttcacgctgacccggtggctcccgggtgatggcgtggacctggcgcgcttcgagaaagtgagcgcccaccatgcccgtatgctggagcgtcccgccgtgcagcgggccctggcggcccagcaaagc

SEQ ID NO: 447 - protein, 206 aa, Artificial Sequence
  Description of Artificial Sequence: Synthetic polypeptide
MLTLYYAPGTCALASLIALEESGLAFEVKKISLRDGEQRSPDYLKINPKGRVPALVTDYGVLTETPAILAYIAQSAPAAKLAPLDDPFEFARLQSFNSYICSTVHVNHAHRPRGSRWADEPAAIEAMKAKVPQNMVDCFTLIEQTMFEGPWVMGEAYSLADPYLFVMTDWLPSDGVDPARFEKASDHHARMLQRPAVQRALAYDRA

SEQ ID NO: 448 - DNA, 618 bp, Artificial Sequence
  Description of Artificial Sequence: Synthetic polynucleotide
atgctcaccctctactacgccccgggcacctgcgccctggccagcctgatcgccctggaagagagcgggctggccttcgaggtgaagaaaatcagcctgcgcgacggcgaacagcgcagccccgactacctgaagatcaatcccaaggggcgtgtgccggcgctggtcaccgactatggcgtgctgaccgagaccccggcgatcctggcctacatcgcccaatccgccccggcggcgaaactggccccgctggacgaccccttcgagttcgcgcgcctccagagcttcaattcctatatctgctccaccgtgcatgtgaaccatgcccatcggccgcgtggttcgcgctgggcggatgaaccggccgcgatcgaggcgatgaaggcgaaggtcccccagaacatggtcgactgcttcacgctgatcgagcaaaccatgttcgagggcccctgggtgatgggtgaggcctacagcctggccgatccctacctgttcgtgatgaccgactggctcccgtccgacggtgtggaccccgcccgcttcgagaaggcgtcggatcaccacgcccgtatgctgcagcgcccggcggtgcaacgggccctcgcgtacgaccgtgcg

SEQ ID NO: 449 - protein, 206 aa, Artificial Sequence
  Description of Artificial Sequence: Synthetic polypeptide
MKIYDVENFPNPLRVRIALAEKKATDKVEFVAVDLLNGEHRTEAFLAKNPLAGVPVLELDDGTFIAECTAITEYIDTAFAGPSLTGVEAKERAVINMMQKRAESMVLDAVATYFHHATDGLGPALETYQNVAWGEKQGEKARQGFVYFNTVLANSAYVAGENFSVADITLYAGLVFAGFAKIAIPSELSHLIAWQEKVAQRPSIAA

SEQ ID NO: 450 - DNA, 618 bp, Artificial Sequence
  Description of Artificial Sequence: Synthetic polynucleotide
atgaagatctacgacgtggagaacttcccgaacccgctgcgcgtgcgcatcgcgctggccgaaaagaaggccacggacaaggtcgagttcgtcgccgtcgacctgctgaacggtgaacaccgcaccgaagcgttcctggccaaaaatccgctggcgggggtgccggtcctggaactcgacgatggtacgttcatcgccgagtgtacggcgatcaccgagtacatcgacacggccttcgccggtccgtccctgaccggtgtggaagcgaaggaacgtgccgtgatcaacatgatgcagaagcgcgccgagtccatggtcctggatgccgtggccacctacttccaccatgccacggatgggctcggccccgcgctcgaaacctatcagaacgtggcgtggggcgaaaagcagggcgaaaaagcgcggcaggggttcgtctacttcaataccgtcctggccaacagcgcctacgtcgccggtgagaatttctccgtcgccgatatcaccctctatgcgggcctggtgttcgccggcttcgcgaagatcgccatccccagcgaactgtcgcatctgatcgcctggcaggaaaaggtggcccaacggccgtccatcgccgcc

SEQ ID NO: 451 - protein, 236 aa, Artificial Sequence
  Description of Artificial Sequence: Synthetic polypeptide
MILLVLPGAEDDPIDAVVLMASLAAESTMNPIKHYHFPLSGHSHRVQLMLSLLGLPVEEVFVDLAKGAHKQADFLALNAFGQVPVIDDDGVVLADSSAILVYLAHKYGKGRWLPTDPVGAARVQRWLSVAAGPIHAGPATARLITVFGAAYNAEDVIARSHNVLKVIDQELSNRAYLAGDAATVADIAGYSYIAHAPEGNVSLEDYANVRAWLARIEALPGFVGMPRTVVGLQKHA

SEQ ID NO: 452 - DNA, 708 bp, Artificial Sequence
  Description of Artificial Sequence: Synthetic polynucleotide
atgatcctgctcgtcctgcccggcgcggaggacgacccgatcgacgcggtcgtcctgatggccagcctggcggcggaatcgaccatgaacccgatcaagcactaccacttcccgctgtcgggccattcccaccgcgtgcagctgatgctgagcctgctgggcctgccggtcgaggaggtcttcgtcgacctggccaagggcgcccataagcaggccgacttcctggccctgaacgccttcggccaggtgccggtcatcgacgacgacggcgtggtgctggccgattccagcgcgatcctggtctatctggcccacaagtatggcaaaggccgttggctgccgacggacccggtgggtgcggcccgcgtccaacgttggctcagcgtcgcggccggcccgatccatgccggcccggcgaccgcgcggctgatcaccgtcttcggcgccgcgtacaatgccgaggacgtcatcgcgcgcagccataacgtgctgaaggtgatcgaccaagagctgagcaatcgggcctacctggcgggcgacgcggccaccgtcgccgacatcgcgggctactcgtacatcgcccacgccccggaaggcaacgtgagcctcgaagattacgccaacgtccgcgcctggctcgcgcggatcgaggcgctgccgggcttcgtggggatgccgcgtacggtcgtgggcctccagaagcatgcg

SEQ ID NO: 453 - protein, 213 aa, Artificial Sequence
  Description of Artificial Sequence: Synthetic polypeptide
MQESNRPAKPLVLYRSPVSGHAHRAELFLGLLGLPYRLVDVDLRGGEQRSEAFLRLNPFGQVPVLDDDGVVVGDSNAILVYLATRYDDGRWLPRDPVGAARVQRWLSVAAGDIAFGPAAARLGVLFGRPVAMDDAIARAQRLFTLMETLLAGQPFLAADHATIADVAAYSYIARAEEGNVPLAPYPALNAWLRRIEALPGFVPMLVSKVGLAA

SEQ ID NO: 454 - DNA, 639 bp, Artificial Sequence
  Description of Artificial Sequence: Synthetic polynucleotide
atgcaggagtccaatcgcccggccaagcccctggtgctgtatcgcagcccggtcagcggccacgcccatcgcgccgaactgttcctgggcctgctgggcctgccctatcgcctggtcgacgtggacctgcggggcggggagcagcgctccgaggcgttcctgcggctgaacccgttcggccaggtccccgtcctggatgacgacggcgtggtcgtcggtgacagcaacgccatcctcgtctacctggccacccgctacgacgacgggcgctggctcccccgtgatcccgtgggtgcggcccgtgtccaacgctggctctccgtggcggccggcgatatcgccttcggtcccgccgccgcccgtctgggtgtcctcttcgggcggcccgtcgcgatggacgacgccatcgcccgggcccaacgtctgttcaccctgatggagaccctcctggccggccaaccgttcctggccgcggatcatgcgacgatcgcggacgtggccgcgtactcgtacatcgcgcgcgccgaagaagggaacgtcccgctggccccgtacccggccctgaatgcgtggctccgtcggatcgaggcgctccccggcttcgtccccatgctggtgtccaaggtcggcctggccgcc

SEQ ID NO: 455 - protein, 203 aa, Artificial Sequence
  Description of Artificial Sequence: Synthetic polypeptide
MKLYHHPLSGHSHRAHLFLSLLGVAYELVEVDLAAGAHKAPDFLKLNRFGQVPVLDDDGTVIADSSAILVYLARKYGHTDWLPEDAVSAAQIQKWLSVAAGEIAYGPCAARLVTVFGADFRTEEVIARAHRILALLEAELGARSFLLGDRPTIADIALYSYIANAPEGNVDISAYPSVRAWLARTEALPGFVGFRKTKIGLAA

SEQ ID NO: 456 - DNA, 609 bp, Artificial Sequence
  Description of Artificial Sequence: Synthetic polynucleotide
atgaagctctatcaccatcccctgtcgggccactcgcatcgcgcccacctgttcctgagcctgctcggcgtcgcgtatgagctcgtcgaggtcgacctggcggccggtgcccacaaagccccggatttcctgaagctgaaccgcttcggccaggtgccggtgctggacgacgacggcaccgtgatcgcggattcgtcggcgatcctggtctacctggcgcgcaagtatgggcacacggactggctgccggaagacgcggtgagcgccgcgcagatccagaaatggctgagcgtggccgcgggcgaaatcgcgtacggcccctgtgccgcccggctcgtgaccgtcttcggggccgacttccgcacggaagaggtgatcgcgcgggcccaccgcatcctcgccctgctggaagccgaactcggggcgcgtagcttcctgctcggtgaccggcccaccatcgccgacatcgcgctgtactcctacatcgccaatgcgccggagggtaatgtggacatctcggcgtaccccagcgtgcgggcctggctggcccgtaccgaggccctgcccggcttcgtcggcttccggaagaccaagatcggtctggccgcg

SEQ ID NO: 457 - protein, 215 aa, Artificial Sequence
  Description of Artificial Sequence: Synthetic polypeptide
MTTETLKLYHSASSPNSRRVRIFLAEKGVPVTLVAVDLGKGEQHGDTYRAINPRRVVPTLVLEDGTSIGEVPAIQRYVEETHPDAPLFGTTPKDKALITMWERRAEQEGFASVMEAIRNIAPGLKGRAIAGPHDYEQIPALAERSRQRAANFLADLDDRLKDSAFVAGERYSVADITALVTIDFAAKAIDLQVPADLESLKRWYDTVSSRPSAAA

SEQ ID NO: 458 - DNA, 645 bp, Artificial Sequence
  Description of Artificial Sequence: Synthetic polynucleotide
atgaccaccgaaaccctcaagctgtaccactccgcctcctcgccgaactcccgtcgcgtgcgcatcttcctggccgagaagggtgtccccgtcacgctggtcgcggtggacctgggcaagggtgagcagcatggtgacacctaccgcgccatcaatccgcgtcgcgtcgtcccgaccctcgtcctggaagatggcaccagcatcggcgaggtgccggcgatccagcgctacgtcgaggaaacgcaccccgatgccccgctgttcgggacgaccccgaaggacaaggccctgatcaccatgtgggagcgtcgcgcggagcaggagggcttcgcgagcgtgatggaggccatccgtaatatcgcgcccggcctgaagggtcgcgcgatcgccggcccgcatgactatgagcagatcccggccctggccgaacgcagccgccaacgtgcggcgaacttcctggccgacctcgacgaccggctgaaggatagcgccttcgtggcgggcgaacgctacagcgtggccgacatcaccgcgctcgtgaccatcgatttcgcggcgaaggccatcgacctccaagtgcccgccgacctggagtcgctgaagcggtggtatgacaccgtgagcagccgccccagcgcggcggcg

SEQ ID NO: 459 - protein, 204 aa, Artificial Sequence
  Description of Artificial Sequence: Synthetic polypeptide
MQLYYAPNTISVAVAIALEEAGLAYEAVKIDFAEKQQTTRAYHQINPKGRVPALAVEGGILTETGALLEFIADLAPDADLRPSDPVLQARMREVMFYLASTMHVNHAHKMRGSRWASNPASFKDMARKVPETMAASCEYICNHGLRGPFVLGDTPCLADFYLYVVCTWLEGDGVKLAGFPKLRAFIEAMDARDSVKTVRAKDML

SEQ ID NO: 460 - DNA, 612 bp, Artificial Sequence
  Description of Artificial Sequence: Synthetic polynucleotide
atgcaactctactacgccccgaacaccatctcggtggccgtcgccatcgcgctggaggaagcgggcctggcgtatgaggcggtgaaaatcgacttcgcggagaagcaacagaccacccgcgcctaccaccagatcaacccgaaaggtcgcgtgccggccctggccgtggaaggtggcatcctgacggagaccggggccctcctggagttcatcgccgacctggccccggatgcggacctgcggccgagcgatcccgtcctgcaggcccgcatgcgtgaagtcatgttctacctggccagcaccatgcacgtcaaccacgcgcacaagatgcgcggctcccggtgggccagcaaccccgcctcgttcaaggacatggcccggaaggtcccggaaaccatggccgcctcctgcgagtacatctgcaaccacgggctgcgcgggcccttcgtgctcggcgacacgccgtgcctcgccgacttctacctgtacgtggtctgcacctggctggaaggggacggtgtcaagctggcgggcttcccgaagctgcgggccttcatcgaggccatggacgcgcgcgatagcgtcaaaaccgtgcgcgccaaggacatgctg

SEQ ID NO: 461 - protein, 209 aa, Artificial Sequence
  Description of Artificial Sequence: Synthetic polypeptide
MITLYGTPRSRALRVSWVLEELGAEWAFSFVDMNKGEHRSAAFLALNPCGKVPVLTDDNLVLSESAAICLYLAEKFGQLLPAPGTTASGLHHQWVSFIITELEQPLWTMGKHKFALPEAQRHPSIMPCAVWEFDKAAALAEAMLPDSDFLLGDTLSVADILLAHTLIWGTLFEQQIPPKLAAYRDRVAARPSRKSALAKMEAVANAAQA

SEQ ID NO: 462 - DNA, 627 bp, Artificial Sequence
  Description of Artificial Sequence: Synthetic polynucleotide
atgatcaccctgtatggtacgccgcgctcccgtgccctgcgcgtctcctgggtgctggaggagctgggcgccgaatgggccttcagcttcgtggacatgaataagggggagcatcgctcggcggccttcctcgcgctgaacccgtgtggtaaggtgccggtgctcaccgacgacaacctggtgctgtccgagtcggccgcgatctgcctgtatctggccgagaaattcggtcaactgctgcccgcccccggtacgaccgcctcggggctccaccaccagtgggtgagcttcatcatcaccgaactggagcagccgctgtggaccatgggcaaacacaagttcgcgctgccggaagcccagcgccacccgagcatcatgccctgtgcggtgtgggagttcgacaaggccgcggcgctggccgaggccatgctgccggactcggacttcctcctgggcgataccctgagcgtcgccgacatcctgctggcgcacacgctcatctggggcaccctgttcgaacagcagatcccgccgaagctggccgcctatcgggaccgggtcgccgcgcgtccgtcccgcaaatcggccctggcgaagatggaagccgtcgcgaacgccgcccaggcc

SEQ ID NO: 463 - protein, 202 aa, Artificial Sequence
  Description of Artificial Sequence: Synthetic polypeptide
MKLYYAPGSCSLAPHIALREAGLNFELEKVDLASKQTEHGEDFTKINPNGYVPTLKLDNGEILSEVAVLLQYIADEKPDAKLAPKFGGMERYRLMEWLNFIATEIHKTLGALFHPNITPEWKTAQLATFSKHCNFLADQLDGKQYLLGNLFTIADAYLFTTLSWTKFHQVDMSKWPALTDYMTRIAARPAVIETMQKEGLIR

SEQ ID NO: 464 - DNA, 606 bp, Artificial Sequence
  Description of Artificial Sequence: Synthetic polynucleotide
atgaagctgtactatgcccccggcagctgttcgctcgccccgcatatcgccctccgtgaagccggcctgaatttcgagctggaaaaggtggacctggcctccaagcagaccgagcacggcgaggatttcaccaagatcaaccccaatggctacgtcccgaccctcaagctggacaatggcgagatcctgagcgaggtcgccgtgctgctgcaatacatcgcggacgaaaaaccggatgccaagctggccccgaagttcggcggcatggaacgctaccgcctgatggagtggctcaacttcatcgccacggaaatccataagaccctgggcgcgctgttccatccgaatatcacccccgaatggaagaccgcgcagctggccaccttctccaagcactgcaacttcctggccgatcagctggacggcaagcagtacctgctcgggaacctgttcaccatcgccgatgcgtacctcttcacgacgctgtcctggaccaagttccaccaggtggatatgtccaagtggccggcgctgaccgactacatgacccgtatcgccgcccggcccgccgtgatcgagacgatgcagaaggagggtctcatccgg

SEQ ID NO: 465 - protein, 215 aa, Artificial Sequence
  Description of Artificial Sequence: Synthetic polypeptide
MTTTLFGYWRSSAAYRLRIALNLKGVAYDQVAVNLKEGEQSGADWLAIQPQGLVPVLEHDGERLLQSPAILEWIDETWPEPGFLPRDPVERCRVRGWASIIGCDIHPLQNLRVLKTVAGDLGQGPDGMKAWAQRWMRSGLDALETLVEAAPRTGAFLGGQAPGLADIYLVPQLYNARRWGLDATAWPALEAADAACQALPAFQDALPENQPDADA

SEQ ID NO: 466 - DNA, 645 bp, Artificial Sequence
  Description of Artificial Sequence: Synthetic polynucleotide
atgacgaccacgctgttcggttattggcggtcgtccgcggcctatcgcctgcggatcgccctcaacctcaagggcgtcgcctacgaccaggtcgcggtcaacctgaaggagggcgagcagtccggggcggattggctggccatccagccgcagggcctggtccccgtcctggaacatgatggtgaacgcctcctgcagtccccggccatcctggagtggatcgacgaaacgtggccggaacccggcttcctgccgcgtgaccccgtcgaacgctgtcgcgtgcgtggctgggcgtcgatcatcgggtgcgatatccacccgctgcagaacctgcgtgtcctcaagaccgtcgccggcgatctgggtcaaggcccggatggcatgaaagcctgggcccaacggtggatgcgcagcggcctcgatgccctggagaccctggtcgaggcggccccgcgtaccggcgcgttcctcggtggtcaggcgcccggcctcgccgatatctacctggtgccccagctgtacaacgcccgccgctggggtctggatgccaccgcctggcccgcgctggaagcggcggacgcggcctgccaagcgctgcccgccttccaggacgcgctgccggagaaccagccggacgcggacgcc

SEQ ID NO: 467 - protein, 209 aa, Artificial Sequence
  Description of Artificial Sequence: Synthetic polypeptide
MITLYGMPRSRALRVAWVLEELGAEWAFSFVDMNKGEHRSAAFLALNPCGKVPVLTDDNLVLSESAAICLYLAEKFGNLLPEAGTAASGLHHQWVSFIITELEQPLWTLGKHKFALPEAQRHPSIMPCAVWEFDKAAALAEAMLPDSDFLLGDTLSVADILLAHTLMWGTLFEQQIPPKLAAYRDRIAARPSRKSALAKMEAVANAAQA

SEQ ID NO: 468 - DNA, 627 bp, Artificial Sequence
  Description of Artificial Sequence: Synthetic polynucleotide
atgattaccctgtacggcatgccccgtagccgtgccctgcgtgtcgcctgggtcctggaggagctgggtgccgaatgggccttctccttcgtcgacatgaacaaaggggagcatcgtagcgcggccttcctggccctgaatccgtgcggtaaggtgcccgtcctgaccgacgacaacctggtcctgtccgaaagcgcggcgatctgcttgtacttggccgagaagttcgggaacctgctcccggaagccgggaccgcggccagcgggctccaccaccagtgggtgagcttcattatcacggagctggagcagcccctctggaccctggggaagcacaagtttgccctgccggaggcgcagcgccatccgagtatcatgccctgcgccgtctgggagttcgacaaggccgccgccctggccgaggcgatgctgccggatagcgacttcctcctcggcgataccctgagcgtggccgatatcctgctggcccatacgctgatgtggggaaccctctttgagcaacagatcccgccgaagctggcggcctatcgcgatcgcatcgccgcccgcccgagtcgtaagtccgccctcgccaaaatggaggccgtagcgaacgccgcccaggcc

SEQ ID NO: 469 - protein, 208 aa, Artificial Sequence
  Description of Artificial Sequence: Synthetic polypeptide
MKLYELAPTPSARRVSIFLAEKGINIPRVNVDIRGGENLSPEFKAKSLNGRIPLLELDDGSYLCESVAICRYLEEIHPSATSLFGNSPLERARVEMWQRIIELQGLMVGFQAFRNLTGIYKDRENCVEAWGAESRQRIIDFLPTLDQQLAKSSYVASDNFTIADISAYVFISFIKNLDILVDDTLPHIQAWFSTVAQRPAIVSLTPKN

SEQ ID NO: 470 - DNA, 624 bp, Artificial Sequence
  Description of Artificial Sequence: Synthetic polynucleotide
atgaagctgtatgagctggcgccgaccccgagcgcccgtcgcgtcagcattttcctggcggagaagggcatcaatatcccgcgcgtgaatgtagacatccggggcggagagaacctgagcccggagtttaaggccaagtcgctgaacggccgcatcccgttgctcgaactggacgatggttcctatctctgcgaatccgtggcgatctgccgctatctggaagagatccatccgagcgcgacgagtctcttcgggaacagcccgctggagcgtgcgcgcgtagagatgtggcagcgtatcattgaactgcagggactcatggtgggcttccaagccttccggaacctgacgggcatttataaggaccgcgagaattgcgtcgaggcctggggagccgaaagccgtcagcgcatcatcgacttcctcccgaccctcgaccaacagttggcgaagtccagttacgtggcgtccgataacttcaccatcgcggacatcagcgcgtacgtcttcatcagcttcatcaagaacctcgatatcctcgtggacgacaccctgccgcacatccaggcctggttcagcaccgtcgcccaacggccggccatcgtgtcgctgaccccgaagaac

SEQ ID NO: 471 - protein, 206 aa, Artificial Sequence
  Description of Artificial Sequence: Synthetic polypeptide
MKIYDIEGFPNPLRVRIALAEKGATNQVEFVPVDVMGGEHRSEAFKTKNPDATVPMLELDDGTCIAQCNAITEYIDGVFDGPSLMGTTPAERARIAMMNLRAENGLMNAVGAYFHHATPGLGPDLETWQCAEWGNKQKEIASATMAYLDSVLADNEFLAGDSFSVADITAFAGLGFADFAKVDIPESLTNLQAWRAKVAARPSISG

SEQ ID NO: 472 - DNA, 618 bp, Artificial Sequence
  Description of Artificial Sequence: Synthetic polynucleotide
atgaagatctacgacatcgagggctttccgaaccccctgcgtgtccggatcgcgctggccgaaaagggagcgaccaatcaggtcgagttcgtcccggtggatgtcatgggcggtgagcatcgcagcgaggcgttcaagaccaaaaacccggacgccaccgtgccgatgctcgaactcgacgacggcacctgcatcgcccagtgcaacgccatcaccgagtatattgacggcgtcttcgacggcccctccttgatgggtaccaccccggccgaacgggcgcgtatcgccatgatgaacctgcgcgcggaaaatgggctcatgaatgcggtgggcgcctatttccaccacgccaccccggggctggggccggacttggaaacctggcagtgtgccgagtggggaaacaagcagaaggagatcgccagtgccaccatggcctacctggatagcgtactcgcggataacgagttcctggcgggcgactcgtttagcgtggcggacatcaccgccttcgcggggctcggcttcgcggacttcgcgaaggtagacattccggaatcgctgaccaatctgcaggcctggcgcgcgaaagtggccgcccgtccgtccatcagtgga

SEQ ID NO: 473 - protein, 206 aa, Artificial Sequence
  Description of Artificial Sequence: Synthetic polypeptide
MKIYDTEGFPNPLRVRIALAEKGATDKVVFVPVDVMGGEHRTTDFRAKNPDATVPVLELDDGTCIAQCNAITEYLDGVFDGPSLTGASPKERAVIAMMNIRAESGLMNAVGAYFHHATRGLGPDLETWQCPDWGNKQKEVAQSTMAYLNEVLAENEFLAGDRFTVADITAYAGLVFAEFAKVDIPGHLDHLLAWRARVAARPSITG

SEQ ID NO: 474 - DNA, 618 bp, Artificial Sequence
  Description of Artificial Sequence: Synthetic polynucleotide
atgaagatctacgacacggagggctttcccaatccgctccgggtgcgcatcgccctggccgagaagggcgcgaccgacaaggtggtgttcgtgccggtggacgtcatgggcggtgaacatcgcaccacggacttccgggccaaaaatcccgacgccaccgtcccggtcctggaactggacgacggcacctgtatcgcccagtgtaacgccatcaccgaatacctggacggcgtcttcgacggcccgtccctcaccggtgccagtccgaaggaacgcgccgtaatcgcgatgatgaacatccgggcggaaagcggcctcatgaacgccgtcggcgcgtacttccatcatgcgacgcgcgggctgggcccggacttggaaacctggcaatgccccgactggggcaacaagcaaaaagaggtcgcgcagtcgaccatggcgtatctgaacgaagtgctggcggagaacgagttcctcgcgggggaccgcttcacggtggccgacatcacggcctatgccggcctggtcttcgcggagttcgcgaaagtggacatcccgggccacctggatcacttgctggcgtggcgcgcgcgtgtagcggcccgtccgagtatcaccggc

SEQ ID NO: 475 - protein, 205 aa, Artificial Sequence
  Description of Artificial Sequence: Synthetic polypeptide
MKLFETRTAPNPRRVRMFLAEKGLLDQVELVQVDIEKGENLSPDFVARNPMKKVPVLELDDATCIAETMAICRYFEESYPDTPSLLGESPLEKALVEQWLRWIEFYFMMPTGMCFQHTTGYFKDRMNPIKEWGEECGQGVEKFMHFLNKQLEGKEYLCCDRFTAADINAFTTVAFARVVNIRIKPEQEHLQAWFDRIKARPSAQV

SEQ ID NO: 476 - DNA, 615 bp, Artificial Sequence
  Description of Artificial Sequence: Synthetic polynucleotide
atgaagttgttcgagacgcgtaccgccccgaatccgcgtcgcgtccgcatgttcctggccgaaaagggtctcctggatcaggtggagctggtccaagtagatattgagaaaggcgaaaacctgtccccggatttcgtggcgcggaacccgatgaagaaggtcccggtactggaattggatgatgccacgtgcatcgcggagacgatggccatttgtcggtacttcgaggaaagctatccggacacgccgagtttgttgggcgagagtccgctcgaaaaggccctggtagagcagtggctccgctggatcgagttctacttcatgatgccgaccggcatgtgctttcagcataccaccggctacttcaaggaccgcatgaacccgatcaaagagtggggcgaggagtgcggccaaggtgtcgagaagttcatgcatttcctgaacaaacagctggaaggcaaggagtatctctgttgcgatcggttcaccgccgccgacatcaatgccttcaccaccgtcgccttcgcccgcgtggtcaatatccgcattaaacccgaacaggagcatctgcaagcctggttcgatcgcatcaaggcccgtccgtcggcccaggtc

SEQ ID NO: 477 - protein, 206 aa, Artificial Sequence
  Description of Artificial Sequence: Synthetic polypeptide
MKIYETTGFPNPLRVRIALAEKGATNKVIFVPVDVMGGEHRTSAFKAKNPDATVPLLELDDGTCIAHCNAITEYLDGIFDGPSLTGTSPKERAVIAMMNIRAESGLMNAVGAYFHHATQGLGPDLETWQCPDWGSKQKEVAQLTMIYLDGVLTESDFVAGNRFTVADITAYAGLVFAEFAKVEIPENLRALKAWRDRVAARPSING

SEQ ID NO: 478 - DNA, 618 bp, Artificial Sequence
  Description of Artificial Sequence: Synthetic polynucleotide
atgaagatctacgagaccaccggcttccccaatccgctgcgtgtccgcatcgcgctcgcggaaaagggtgccaccaacaaggtgatcttcgtgccggtcgacgtgatgggcggtgagcatcggacctcggcgttcaaggcgaagaacccggatgccaccgtccccctcttggaactggacgacggtacctgtatcgcgcactgtaacgccatcaccgagtacctggacggcatcttcgacggtccgtccctgaccggcacctcgcccaaggagcgcgcggtcatcgccatgatgaacatccgggccgaatcgggcctgatgaacgcggtaggtgcctacttccaccacgccacgcaaggtttgggtccggacctggagacgtggcagtgtccggactggggcagcaagcagaaggaggtagcccaactgaccatgatctatctggacggggtgctcaccgagagcgacttcgtcgccgggaaccgttttaccgtggcggacatcaccgcctatgccgggctggtgttcgccgagttcgccaaggtggagatccccgagaacctgcgcgccttgaaagcctggcgcgaccgggtcgccgcgcgccccagtatcaacggc

SEQ ID NO: 479 - protein, 234 aa, Artificial Sequence
  Description of Artificial Sequence: Synthetic polypeptide
MSLHLISHALCPYVQRAAISLTEKGVTFERTHIDLSNKPDWFLAISPLGKTPVLVVDGTPIFESAVILEYLEDTQPHALHPHDALDRARHRAWIEFGSAVLNDIAGFYSAPNDKALEAKVAALRAKFLRLDAELGEGPWFDGHQFSLVDVVFGPVFRYFDVFDAIGEFGVFTGLARVRAWRYELERRVSVKSAVSEDYPTLLRDFIRRRNSYLSQIMQTGRPKKTVTQVQSADR

SEQ ID NO: 480 - DNA, 702 bp, Artificial Sequence
  Description of Artificial Sequence: Synthetic polynucleotide
atgagcctgcacctgatctcccatgcgctgtgcccctacgtacagcgggcggccatctccctgaccgagaaaggcgtgacgttcgagcgcacgcacatcgacctctcgaacaagcccgactggttcctggccatctccccgctgggaaagacgccggtgctggtcgtcgacggtacgccgattttcgagtccgccgtgatcctggagtacttggaggacacccagccgcatgcgctccacccgcatgatgccctggaccgcgcccgccatcgggcgtggatcgagtttggctcggcggtcctgaacgatatcgcgggattctattccgcccccaacgacaaggccctcgaagccaaggtagcggcgctgcgcgccaaattcctccggctggatgccgaactgggcgaaggcccgtggttcgatggccaccaattctccctggtcgatgtggtgttcggccccgtcttccgctatttcgacgtctttgatgcgatcggcgagttcggggtcttcacgggtctggcccgcgtccgtgcgtggcggtacgagctggaacgtcgcgtctcggtgaagtcggcggtcagcgaagattatccgacgctgctgcgcgacttcatccggcgccgcaactcgtatctgtcgcagattatgcagaccggccggcccaagaagaccgtaacccaggtccaaagcgccgatcgt

SEQ ID NO: 481 - protein, 209 aa, Artificial Sequence
  Description of Artificial Sequence: Synthetic polypeptide
MSGDLVFYHNPQSRAQMVHWMLHEVGAPFRVVRIDLQKGEQKSPEFLAVNPMGKLPALVHDGTVVTETAAIITYLADAFPQAGLAPSAGDTRRGTYLRWLFFGAGCFEPALLDMMLKRPQVDSKSTIGYGSYEDTLGAFKKMLTPGPYILGGQFSAADVYVGSQIAWALSFKAPGLQEPIFTDYVARITARPAYKKAAIADGRLPADKA

SEQ ID NO: 482 - DNA, 627 bp, Artificial Sequence
  Description of Artificial Sequence: Synthetic polynucleotide
atgagcggggatctggtgttttaccacaatccccaatcgcgggcccaaatggtccactggatgctgcatgaggtgggggcgcccttccgtgtcgtgcgcatcgacctccagaagggagagcagaagtcgccggagttcctcgccgtcaacccgatgggcaagctgcccgccttggtgcatgacggcacggtggtcaccgagacggccgccatcatcacgtacctggcggacgcgtttccccaggcgggattggccccgagcgccggcgacacccgccgtgggacctatctccggtggctgttcttcggcgcgggctgtttcgagccggcgctgctcgacatgatgctgaagcgcccccaggtggacagcaagagcaccatcggctacggcagttacgaggataccctcggcgcgttcaaaaagatgctcaccccggggccgtatatcctgggtggtcagttttcggccgcggatgtctacgtgggcagccagatcgcgtgggcgttgtcgttcaaggccccgggcctgcaggaacccatttttacggactacgtcgcccgcatcaccgcgcgccccgcgtataaaaaggccgccattgcggacggacgtctcccggcggataaggcg

SEQ ID NO: 483 - protein, 214 aa, Artificial Sequence
  Description of Artificial Sequence: Synthetic polypeptide
MKIFDIPGFPNPLRIRIVLAEKNLASQIEFIKVDLPAAEHKQAAFLAINPTGTVPVLQLDDGTYISECTAITEYLDNLDGNPVLTGKSPKEKALVHMMQKRAESELIDAVGIYFHHATPGLGPALQAYKSPDWEGRREWGERSRDKAVAGMRYFDKVLTAQPYVAGESFSMADITVWAGLVFAGFANIRVPEECTALLNWRQTIDERSSVKNPA

SEQ ID NO: 484 - DNA, 642 bp, Artificial Sequence
  Description of Artificial Sequence: Synthetic polynucleotide
atgaagatcttcgacattccgggcttccccaacccgttgcgcatccggatcgtgctggcggagaagaacctggccagccagatcgagttcattaaggtggacctgccggccgccgaacacaagcaggccgcgtttttggccatcaatccgaccggcaccgtcccggtgctgcaactggatgacgggacctacatcagcgagtgtaccgccatcaccgagtacctcgacaacctcgacggtaacccggtactgaccggaaagagccccaaggaaaaggcgctggtccacatgatgcagaagcgcgccgaatccgaactgatcgacgcggtagggatctatttccaccacgcgaccccgggcctgggaccggccctgcaggcctataaatccccggattgggagggccgccgcgaatggggcgaacgctcgcgcgacaaggccgtcgccggtatgcggtatttcgataaggtgctcaccgcccaaccctatgtcgcgggtgaaagtttctccatggcggatatcaccgtctgggccggtctggtgttcgccgggttcgcgaatatccgtgtccccgaggagtgcaccgcgctcctgaattggcgccagaccatcgacgagcgttcgagcgtaaagaacccggcg

SEQ ID NO: 485 - protein, 202 aa, Artificial Sequence
  Description of Artificial Sequence: Synthetic polypeptide
MKIYETKTAPNPRRVRMFLAEKGIDVDYVQVDIQKGENLTAEMRAKNPLGKIPILELDDGTCIAETDAICTYFEALQPEPPLMGTTPVEKATISMWQRQVEFAFMMQIGMCFQHTTGYFKDRMTPVPEFGKEAGINASKYLNILERRLGVKEFIAGDTFSIADITALCAMDFARVVKIRMTDEHVNLARWYEAVSNRESAKA

SEQ ID NO: 486 - DNA, 606 bp, Artificial Sequence
  Description of Artificial Sequence: Synthetic polynucleotide
atgaagatctatgaaaccaagaccgccccgaatccccggcgcgtccgtatgttcctggccgagaaggggatcgatgtggactacgtgcaagtggacatccaaaagggcgaaaacctgaccgcggagatgcgggccaagaatccgctcgggaagatccccatcttggagttggatgatgggacctgcatcgccgagaccgacgccatctgcacctattttgaagcgctgcagcccgaaccgccgctgatgggtaccacgcccgtcgaaaaggccacgatttccatgtggcaacggcaggtcgagtttgccttcatgatgcagatcggcatgtgcttccaacacaccaccggctacttcaaggaccgcatgaccccggtcccggagttcggcaaagaggcgggtatcaatgcgagcaagtacctcaacatcctcgaacgccgtctgggtgtaaaggagttcatcgccggcgacaccttctcgatcgccgatattaccgcgctgtgcgccatggacttcgcgcgggtcgtcaagatccgcatgacggacgaacatgtcaacctggcccgttggtacgaggcggtgagcaaccgtgagtccgccaaggcc

SEQ ID NO: 487 - protein, 253 aa, Artificial Sequence
  Description of Artificial Sequence: Synthetic polypeptide
MVVIVPTNKSVEAFEGLHLYHGDISNCSMRVRMTLIEKGLVWDGHHLDLKKKENITDDYFGINPNGLVPTLIDNGVVHIESNDIIDYLDETYPEPSLRHGDEAEMKSWLHLAAALHVPACKPYVYATKMAPKIKKTAEEEAKYNALQKNEELKSFHAKHAGGKDFSTSDLDKATAILDACFFKLEKTLEDRTWIMGEQYTLADISWIPLHFVLLGCGYPFENYPNIVRWAEAFAKKDSFKEGVLKWCANFADV

SEQ ID NO: 488 - DNA, 759 bp, Artificial Sequence
  Description of Artificial Sequence: Synthetic polynucleotide
atggtcgtgatcgtcccgaccaacaagtccgtggaagccttcgaaggcctgcacctgtaccacggcgacatctcgaactgttccatgcgggtgcgcatgaccctcatcgagaagggcctggtctgggacgggcaccatctcgacctgaagaagaaggagaacatcacggacgactacttcggcattaaccccaacggtctggtcccgaccctgatcgataacggagtcgtgcatatcgagtccaacgacatcatcgactacctggatgagacctaccccgagccgagtctccgtcatggggacgaggccgagatgaaatcgtggctccatctcgccgccgccctgcacgtgccggcctgcaagccgtatgtctacgcgaccaaaatggccccgaagatcaagaagaccgccgaggaagaggcgaagtacaacgcgctgcagaaaaacgaggaactcaagagctttcacgcgaagcacgcgggcggtaaggacttctcgaccagcgatctggataaggcgacggcgatcctggacgcctgcttcttcaagctggagaagaccctggaggaccgcacgtggatcatgggagagcagtacaccctggcggacatctcctggattcccttgcatttcgtgctgctgggctgcgggtacccgttcgaaaactacccgaacatcgtccgctgggccgaggccttcgcgaagaaggactccttcaaggaaggcgtgctgaagtggtgtgccaatttcgccgacgtc

SEQ ID NO: 489 - protein, 206 aa, Artificial Sequence
  Description of Artificial Sequence: Synthetic polypeptide
MLKLYYAPGTISIAVAITLEEAALPYEAIKIDFKTAEQTQPDYLALNPKGRVPALVLDDGTVLTETGALLEYIAAIAADKNLVPADPKDAAHMRSAMYYLASTMHVAHAHKMRGSRWATQQSSFDDMTAMVLQTMSACAAYVDTHILRGDYVLGDNFSIADPYLFIVCNWLSGDGVDVALYPKILNFMTEMKQRASVGTIYEKAML

SEQ ID NO: 490 - DNA, 618 bp, Artificial Sequence
  Description of Artificial Sequence: Synthetic polynucleotide
atgctcaagctctactacgcccccgggacgatctcgatcgcggtcgccatcaccctcgaagaagccgccctgccgtacgaggcgatcaagatcgacttcaagaccgccgagcaaacccagccggactacctggcgctgaacccgaagggccgcgtgccggccctggtgctggatgacggtaccgtgctgaccgaaaccggcgccctgctcgaatacatcgccgccatcgcggcggacaaaaacctggtgcccgccgatccgaaagacgccgcccacatgcgctccgcgatgtactacctcgcctcgaccatgcatgtcgcccacgcgcataagatgcgtggctcgcgctgggcgacccagcaaagctccttcgacgacatgaccgcgatggtgctgcagaccatgagcgcctgtgccgcgtacgtcgatacgcatatcctccgtggggactacgtcctcggcgacaatttctccatcgccgacccgtacctgttcatcgtgtgcaattggctgtccggcgacggcgtggacgtggccctgtaccccaagatcctgaacttcatgaccgagatgaagcagcgcgcgtcggtcggcaccatctacgagaaggccatgctg

SEQ ID NO: 491 - protein, 204 aa, Artificial Sequence
  Description of Artificial Sequence: Synthetic polypeptide
MQLYYAPRTISVAVAIVLEEAGLDYEAISLDFAGGEQTRPAYKQINPKGRVPALVVDGGILTETGALLDYIAAVAPQAGLVPDDPLMAARMRELMYYLASTVHVNHAHRLRGPRWADKKSSWKDMKEKVPQTMTACCEYIVSNGLRGPFVLGETFSLADAYLYVVCSWLEGDGVDVSAFPKIIAFRDTIEARASVKAVRAAGML

SEQ ID NO: 492 - DNA, 612 bp, Artificial Sequence
  Description of Artificial Sequence: Synthetic polynucleotide
atgcagctctactatgcgccgcggaccatctccgtcgccgtcgcgatcgtcctggaggaggccggcctggactacgaagccatctcgctggatttcgccgggggcgagcagacccgccccgcctataagcagatcaacccgaaaggccgcgtgccggcgctggtcgtggacggcggcatcctcaccgagaccggcgccctcctggattatatcgcggccgtcgcgccgcaagcgggtctggtcccggatgacccgctgatggccgcccgcatgcgcgaactgatgtactacctggcgtccaccgtccatgtcaatcacgcccaccggctccgcggcccgcgttgggcggacaagaaatcgtcctggaaggacatgaaggaaaaggtcccgcagaccatgacggcgtgctgcgagtacatcgtgtcgaacggtctgcgcggtccgttcgtcctgggcgagacgttcagcctcgccgacgcctacctctacgtggtgtgttcctggctggaaggcgatggcgtcgacgtgtccgccttcccgaagatcatcgcgttccgtgacacgatcgaagcccgtgcgagcgtcaaagccgtccgtgcggcgggcatgctg

SEQ ID NO: 493 - protein, 203 aa, Artificial Sequence
  Description of Artificial Sequence: Synthetic polypeptide
MKLYETAMTPSSRRVSIFLKELGLDVERVHVDIRSGENLSDTFLSKSLNGKVPLLELDDGTTLCESVAICRYFDQTYPNSQQLFGRSPLEQAQIEMWHRVVEFQGLYAGFQAFRNLTGIYKDRENCVYAWGEESKARVATFLPQLEQRLAESTFIATDRFTIVDITAYIFIGFVQKALELPVAENYPHITRWYEQVAQRPAFQ

SEQ ID NO: 494 - DNA, 609 bp, Artificial Sequence
  Description of Artificial Sequence: Synthetic polynucleotide
atgaagctctacgagaccgccatgacccccagctcccgccgcgtgtcgatcttcctgaaggagctgggcctggatgtggaacgggtgcatgtcgacatccgcagcggggagaatctgagcgacaccttcctgtccaagtccctcaatggcaaggtccccctcctcgaactggacgacggtaccacgctgtgcgaatcggtcgccatctgtcgctacttcgaccagacctacccgaatagccagcagctcttcgggcgctcgcccctggaacaggcccagatcgaaatgtggcatcgtgtcgtggagttccagggcctgtacgccggtttccaggccttccgtaacctcaccggcatctacaaagatcgcgagaactgcgtgtacgcctggggcgaagagtcgaaagcccgcgtcgccaccttcctcccgcagctcgaacaacgcctggccgagagcaccttcatcgcgaccgaccgtttcaccatcgtcgacatcaccgcgtacatcttcatcgggttcgtccagaaggcgctggagctgccggtcgcggaaaattatccgcacatcacccgctggtatgagcaggtcgcccaacgcccggccttccag

SEQ ID NO: 495 - protein, 222 aa, Artificial Sequence
  Description of Artificial Sequence: Synthetic polypeptide
MTTLQLYFAKGSTFSQRTRVVLLEKGINFTGIEVDLQNKRETFTQVSAYGKVPAIKHGDIEIYESAIINEYLEEVFPEPALLPRDPDGKAIARIWIDYANTRLVPAFNKLLRGKDSQEQEQGRKEFLESLLYIEQKGLGQSSNGAYWLGENLSLVDISFYPWFERLPVLEKFRNFSLPEETPRLQEWWENLRRRESIQQVANSTEFYIDRFSQILGLKTTLK

SEQ ID NO: 496 - DNA, 666 bp, Artificial Sequence
  Description of Artificial Sequence: Synthetic polynucleotide
atgaccacgctgcagctgtatttcgccaagggctccacgttcagccagcgcacccgggtcgtgctgctggagaaagggatcaatttcaccggcatcgaggtcgacctgcagaacaagcgggaaaccttcacccaggtcagcgcgtacgggaaagtccccgccatcaagcatggcgacatcgagatctacgagagcgccatcatcaatgagtacctggaggaagtcttccccgagcccgccctgctgccgcgtgatcccgatggtaaggccatcgcccggatctggatcgactacgccaacacgcgcctggtgccggccttcaacaagctgctgcgtggcaaagacagccaggagcaagagcagggccggaaagagttcctggagtccctcctgtacatcgagcagaaggggctcgggcagtcctcgaatggcgcgtactggctgggggagaacctgtccctggtcgacatcagcttctacccgtggttcgagcgcctgccggtgctggaaaaattccggaacttctcgctccccgaagaaaccccgcgtctgcaagaatggtgggaaaacctccgccggcgcgagtccatccagcaagtcgccaacagcaccgagttctacatcgaccgcttctcccaaatcctgggcctgaagacgaccctgaag

SEQ ID NO: 497 - protein, 215 aa, Artificial Sequence
  Description of Artificial Sequence: Synthetic polypeptide
MTTETLKLYHSASSPNSRRVRIFLAEKGVQVTIVAVDLGKGEQHGDAYRAINPRRVVPTLVLEDGTSISEVPAIQRYVEEIHPDAPLFGTTPRDKALITMWERRAEQEGFASVMEAIRNIAPGLKGRAIAGPHDYEQIPALAERSRQRAANFLADLDDRLKESAFVAGERFSVADITALVTIDFAAKAIDLQVPAGLESLKRWYDTVSSRPSAAA

SEQ ID NO: 498 - DNA, 645 bp, Artificial Sequence
  Description of Artificial Sequence: Synthetic polynucleotide
atgacgacggagaccctgaagctgtatcatagcgcgtcgagccccaactcgcggcgggtgcggatcttcctggcggagaagggggtccaggtgacgatcgtggccgtggacctgggcaagggcgaacaacacggcgacgcctaccgcgcgatcaacccccgccgtgtcgtgcccacgctggtgctggaggacggcacctcgatctccgaggtcccggcgatccagcgctacgtggaagagatccatccggacgcgcccctcttcggtaccaccccgcgggataaggccctgatcaccatgtgggaacgccgcgccgagcaggagggcttcgccagcgtcatggaggcgatccgtaacatcgcgcccggcctgaaaggtcgggccatcgccggtccccacgactacgaacaaatcccggcgctcgcggagcggtcccgccagcgcgccgccaatttcctggcggacctggacgatcggctgaaggaatcggcgttcgtcgcgggcgagcggttcagcgtggcggacatcaccgcgctggtcaccatcgacttcgcggccaaggccatcgacctgcaggtccccgcgggcctggagagcctgaagcgctggtacgacaccgtgtcctcgcgcccgtcggccgcggcc

SEQ ID NO: 499 - protein, 208 aa, Artificial Sequence
  Description of Artificial Sequence: Synthetic polypeptide
MIKLYWHPISGHAHRAHMLLSMLGLDFELIEVDLPAGEHQQAEFLALNPFGQIPVLVDGETIIADSNAILIYLAGVYDDNQSWLPEGPRDRAHVEQFLSLAAHRLAGSIAKLRAANLFNRTIDNEPLALEAYKLLAQLNGYLIERTWLVGAKPTIADLALYSYLKLAPEAGISLADSPDLQRWLTQVEALPGFVPMQVSNVGLNKNRS

SEQ ID NO: 500 - DNA, 624 bp, Artificial Sequence
  Description of Artificial Sequence: Synthetic polynucleotide
atgatcaagctgtattggcacccgatcagcggtcacgcccatcgcgcccacatgctgctgtccatgctgggcctggacttcgagctgatcgaggtcgatctgccggccggtgaacatcaacaggcggagttcctggcgctcaacccgttcggtcaaatcccggtcctggtcgacggcgaaaccatcatcgccgactccaacgcgatcctgatctatctcgcgggggtctacgacgacaaccagtcgtggctgccggaaggcccccgggatcgtgcccatgtcgagcaattcctgtcgctggcggcccatcgcctggcgggctcgatcgccaagctgcgggccgccaacctgttcaaccgtaccatcgacaacgaaccgctggccctggaggcgtacaagctgctggcccagctgaacggctacctgatcgagcgcacctggctggtcggggccaaacccaccatcgcggacctggccctgtactcctacctgaagctggcgccggaggccggcatctcgctggcggattcgccggacctccagcgttggctgacccaagtggaagcgctgcccggcttcgtcccgatgcaggtgtcgaacgtgggcctgaacaagaatcgctcg

SEQ ID NO: 501 - protein, 207 aa, Artificial Sequence
  Description of Artificial Sequence: Synthetic polypeptide
MKIYDFKGFPNPARVRIALAEKGLTDRVEFVHVNVPAGEHKLPAFVAKNPSAAVPVLELDDGTMIAECTAITEYLDHLDGAPTLTGSSPKQRAVIHMMQRRAEAELMDAVATYFHHATPGLGAKIELYQNREWGEKSRDRALAGMAYFDRVLGSQPYLAGDAFSMADITAFVGLGFADFAKIAIPADLANLHEWRARIAARPGVKAS

SEQ ID NO: 502 - DNA, 621 bp, Artificial Sequence
  Description of Artificial Sequence: Synthetic polynucleotide
atgaagatctatgacttcaagggtttcccgaacccggcccgcgtgcgtatcgccctcgcggagaagggcctcaccgaccgggtggagttcgtccacgtcaacgtccccgccggcgaacacaagctccccgccttcgtggccaaaaatcccagcgccgccgtgccggtcctggagctcgacgacggcaccatgatcgccgagtgtaccgcgatcaccgagtacctggaccatctggacggtgccccgacgctcaccggctcgtcccccaagcagcgcgccgtgatccacatgatgcagcgtcgcgcggaagccgagctcatggacgccgtcgccacctacttccaccacgccacgcccgggctgggcgccaaaatcgagctgtaccagaaccgcgagtggggtgagaaaagccgggaccgcgccctcgccggtatggcgtatttcgaccgggtcctgggcagccagccgtatctggccggcgatgccttcagcatggcggacatcaccgccttcgtcggtctgggcttcgccgacttcgcgaagatcgcgatcccggccgacctggcgaacctgcatgaatggcgtgcgcgcatcgcggcgcgtccgggcgtgaaggcgtcg

SEQ ID NO: 503 - protein, 206 aa, Artificial Sequence
  Description of Artificial Sequence: Synthetic polypeptide
MKIYDVENFPNPLRVRIALAEKNATSNVEFVPVDLLNGEHRTKAFLAKNPFAGVPVLELDDGTFISESTAITEYIDTAFEGSSLMGETAKERAVINMMQKRAESMVLDAVATYFHHATDGLGPELETYQNVAWGEKQGEKARQGFSYFNDVLAQSAFVAGEQFSIADITLYAGLVFAGFAQIVIPNELTHLVAWQEKVAKRPSVAA

SEQ ID NO: 504 - DNA, 618 bp, Artificial Sequence
  Description of Artificial Sequence: Synthetic polynucleotide
atgaagatctacgacgtggaaaacttcccgaacccgctccgggtgcgcatcgcgctggccgaaaagaacgccacctcgaacgtcgagttcgtgccggtggacctgctgaacggcgagcaccgcaccaaagccttcctggccaagaacccgttcgcgggggtgccggtgctggagctggacgatggcaccttcatctccgagagcaccgccatcaccgagtacatcgacacggcgttcgagggcagcagcctgatgggcgagaccgccaaagagcgggccgtcatcaacatgatgcagaagcgggcggaaagcatggtcctcgacgcggtggccacgtatttccaccacgccacggatggcctcgggccggagctggagacgtaccaaaacgtcgcgtggggtgagaagcagggcgagaaggcgcggcagggtttctcctacttcaacgacgtcctcgcccagtccgccttcgtggcgggtgagcagttctccatcgcggacatcacgctgtatgccggcctggtgttcgccgggttcgcgcagatcgtcatccccaacgagctgacccacctggtcgcgtggcaggaaaaggtggccaagcggccgtccgtggccgcg

SEQ ID NO: 505 - protein, 209 aa, Artificial Sequence
  Description of Artificial Sequence: Synthetic polypeptide
MITLYGTPRSRALRVAWVLEELGVDWEFSFVDMNKGEHHSEAFLALNPCGKVPVLTDDELVLSESAAICLYLAEKFGKLLPPVGSAASGLHHQWISFIITELEQPLWTLGKHKFALPEAQRHPQIMPCAVWEFDKAVALAENMLPDTTFLLGDTLSVADILLAHTLMWGTLFEQQIPPKLAAYRDRLAARPSRKSALQKMDAVVAHAHD

SEQ ID NO: 506 - DNA, 626 bp, Artificial Sequence
  Description of Artificial Sequence: Synthetic polynucleotide
atgatcaccctgttggcaccccgcgttcgcgggccctgcgcgtcgcgtgggtcctggaggaactgggtgtcgactgggagttctccttcgtggacatgaacaagggcgagcaccactcggaggccttcctcgcgctcaatccgtgcggcaaggtcccggtgctgacggacgacgaactcgtgctcagcgagagcgcggccatctgcctctatctggccgagaagttcggcaaactgctgccgccggtcggttcggcggccagcggcctgcaccaccagtggatcagcttcatcatcaccgaactggaacagcccctgtggaccctgggcaagcacaagttcgccctgcccgaagcccaacggcacccgcagatcatgccgtgcgcggtctgggagttcgataaagcggtcgccctcgcggagaacatgctgcccgacacgaccttcctcctgggcgacaccctgtccgtcgcggacatcctgctggcccataccctgatgtggggtaccctgttcgaacagcagatcccgccgaagctcgcggcgtatcgcgatcgcctggcggcccggccctcccgtaagtcggccctgcagaaaatggacgccgtcgtcgcccacgcccatgac

SEQ ID NO: 507 - protein, 246 aa, Artificial Sequence
  Description of Artificial Sequence: Synthetic polypeptide
MLELYHDWRSFCSIKVRLCLAEKQLPWESRFVDLMKLEHTRPEYTRLNPNGVVPTLVHNGVPIIESTIINEYLEEVFPEISLVPSDPVERARMRAWVKFEDDVLHPSIRPATFTLMMSQELAKLSDVELDEQLAKHPNQQRAEEYRIAARSPVDHAAVEEAKVKMSKALDRLEKQLDTTPYLAGDSYSLADVAAAPFVDRLEELNFARLWDDRPSLSAWIARLKSRPSFSEAVPRRDQRFAAAVIA

SEQ ID NO: 508 - DNA, 738 bp, Artificial Sequence
  Description of Artificial Sequence: Synthetic polynucleotide
atgctcgaactctatcacgactggcgctccttctgtagcatcaaagtccgcctgtgtctcgcggagaagcagctgccctgggagagccggttcgtcgacctgatgaagctggagcatacccgcccggagtatacccgcctgaacccgaatggtgtcgtgccgaccctggtgcacaacggggtcccgatcatcgagtccaccatcatcaacgagtacctggaggaggtgttcccggagatcagcctggtgccgtcggaccccgtggagcgggcgcgtatgcgtgcctgggtcaaattcgaagacgatgtcctccacccgagcatccgcccggcgaccttcaccctgatgatgtcccaagagctggccaagctgagcgacgtcgaactggatgagcagctggcgaagcatcccaaccagcagcgcgccgaggagtatcggatcgcggcccgctccccggtggaccatgccgcggtggaagaggccaaggtgaagatgagcaaggccctggatcgcctggagaagcaactggacaccaccccgtacctcgccggggactcctattccctcgccgatgtcgccgcggccccgttcgtcgaccgcctggaggaactcaatttcgcccgcctctgggacgatcgccccagcctgtccgcctggatcgcccgcctgaaatcgcggccctccttcagcgaagcggtgccgcgccgggaccaacgcttcgccgccgccgtgatcgcg

SEQ ID NO: 509 - protein, 222 aa, Artificial Sequence
  Description of Artificial Sequence: Synthetic polypeptide
MAGEKGLVLLDFWVSPFGQRVRIALAEKGLPYEYVEEDLMAGKSDRLLRSNPVHKKIPVLLHDGRPVNESLIILQYLEDAFPDAPALLPSDPYARAQARFWADYVDKKVYDCGSRLWKLKGEPQAQARAEMLEILKTLDGALGDKPFFGGDKFGLVDAAFAPFTAWFHSYERYGEFSLAEVAPKIAAWAKRCGERESVAKSLYSPDKVYDFIGLLKKKYGIE

SEQ ID NO: 510 - DNA, 666 bp, Artificial Sequence
  Description of Artificial Sequence: Synthetic polynucleotide
atggccggtgaaaaaggcctggtgctcctcgacttctgggtgtcgccgttcggccagcgcgtgcggatcgccctggcggagaagggcctgccgtatgagtacgtcgaagaagacctcatggccgggaagtccgatcggctgctccgcagcaatccggtccataagaagatcccggtcctgctccatgacggccgcccggtcaacgagagcctcatcatcctccagtacctggaagacgcgttcccggatgccccggccctgctgccgtccgacccgtatgcccgtgcgcaagcccggttctgggcggattacgtcgacaagaaggtgtacgattgcggcagccgcctgtggaagctgaagggcgaaccgcaagcccaagcccgcgccgagatgctggaaatcctcaagaccctggacggcgccctgggggacaagcccttcttcggcggcgacaagttcggtctggtcgatgcggcgttcgcgcccttcacggcctggttccatagctatgagcggtatggtgagttctcgctggcggaagtggcgcccaaaatcgccgcctgggcgaagcgctgtggtgagcgtgaatccgtcgccaaatccctgtactcgccggacaaggtgtacgacttcatcggcctcctgaagaagaagtacggcatcgag

SEQ ID NO: 511 - protein, 226 aa, Artificial Sequence
  Description of Artificial Sequence: Synthetic polypeptide
MRLNRSQYMSSIVLYNYFRSSTSYRVRLALHHKGLAFEYKPINLLKSEQLTPEYKAINPLGGVPTLVHDGKIIPESFAIIEYLDEVFPQTPLMPKDAYKRARIRQVCEVINSFMHPMANLKTLKYLTSKHGYDQDQKDEWAQHWIYQGLEVLETTLKEFSGTYSFGDEITMADIFLIPQLLTSQRYKADITKFPTLVKINNNCLKLEAFKKAHPFNQMDTPEEFKK

SEQ ID NO: 512 - DNA, 678 bp, Artificial Sequence
  Description of Artificial Sequence: Synthetic polynucleotide
atgcgtctcaatcgctcccagtatatgtcgagcatcgtgctgtacaactatttccgttcgtcgacgagctaccgtgtgcgcctggcgctccatcacaaggggctggcgttcgagtacaagccgatcaacctgctgaagtccgagcagctgaccccggaatacaaggcgatcaatcccctgggtggtgtgcccaccctggtccacgatggtaagatcatcccggagtccttcgccatcatcgaatatctggacgaagtgttcccgcaaaccccgctgatgccgaaggacgcctacaaacgggcccgtatccggcaggtgtgcgaggtgatcaactccttcatgcaccccatggccaacctcaagaccctgaagtacctcacgtcgaaacacgggtacgaccaagaccagaaagacgaatgggcccagcattggatctaccagggtctggaagtgctggagacgaccctcaaggagttctcggggacctactcgttcggcgatgagatcaccatggccgatatcttcctgatcccccagctgctgacctcccagcgctacaaggccgacatcacgaagttccccaccctggtcaagatcaacaataactgtctgaagctggaggcgttcaagaaggcgcacccgttcaaccagatggatacccccgaagagttcaagaag

SEQ ID NO: 513 - protein, 257 aa, Artificial Sequence
  Description of Artificial Sequence: Synthetic polypeptide
MTLKLYSFGPGANSLKPLATLYEKGLEFEQVFVDPSKFEQHSDWFKKINPRGQVPALWHDGKVVTESTVICEYLEDVFPESGNSLRPADPFKRAEMRVWTKWVDEYFCWCVSTIGWAFGIKAIAQKMSDEEFEEHINKNVPIPEQQLKWRRARNGFPQEMLDEEFRKVGVSVARLEETLSKQDYLVDTGYSLADICNFAIANGLQRPGGFFGDYVNQEKTPGLCAWLDRINARPAIKEMFEKSKREDLLKRQNEKVA

SEQ ID NO: 514 - DNA, 771 bp, Artificial Sequence
  Description of Artificial Sequence: Synthetic polynucleotide
atgaccctcaaactgtatagcttcggcccgggggccaactccctgaaaccgctggccacgctctacgagaaggggctggagttcgaacaggtcttcgtggacccgtccaagttcgagcagcatagcgattggttcaagaaaatcaacccgcgcggccaggtcccggcgctgtggcatgacggtaaagtcgtcaccgagtccaccgtgatctgtgaatacctggaagacgtcttcccggaaagcggcaacagcctgcgtccggccgacccgttcaagcgcgccgagatgcgggtctggaccaagtgggtcgatgagtatttctgctggtgcgtctccaccatcggctgggcgttcggcatcaaggcgatcgcccagaagatgtccgacgaggagttcgaggagcacatcaacaagaacgtcccgatcccggagcagcagctgaagtggcgccgcgcccggaatggcttcccgcaggagatgctggatgaggagttccgcaaggtgggtgtgtccgtcgcccgcctggaagagaccctctccaagcaggactatctcgtcgataccggttactcgctggcggacatctgcaacttcgcgatcgccaatggcctgcagcggccgggcggtttcttcggtgactacgtcaaccaagagaagacgcccgggctctgtgcctggctcgaccgtatcaatgcccgccccgcgatcaaggagatgttcgaaaagtcgaagcgcgaggacctgctcaagcgccagaacgaaaaggtggcc

SEQ ID NO: 515 - protein, 215 aa, Artificial Sequence
  Description of Artificial Sequence: Synthetic polypeptide
MAIKIYGIPMSTCTGRVLYTLKEKSLDYELVPVNLATGEHKHPQFLAKQPFGQIPVLENEGLTLFESRAISRYICDLSPKGEPLYGKTPEDRALVEQWLEVESQNFNPPISTIVFQLVFSKFRGLTPDQEVVESNLKKLDSVLAIYESHLASQDYLAGSFFSLADLSHVPYLHYLINVAKKGDVVTSKKNVSAWWEKISSRPAWQEVVAAAAAAP

SEQ ID NO: 516 - DNA, 645 bp, Artificial Sequence
  Description of Artificial Sequence: Synthetic polynucleotide
atggccatcaagatctacggtatcccgatgagcacatgcacgggacgggtcctctacacactcaaggagaagagcctggattacgagctcgtgcccgtgaatctggccaccggagagcacaagcaccctcaattcctggccaagcagccgttcggtcagatcccggtgctggaaaacgagggcctgaccctgttcgaatcccgtgccatcagccggtacatctgtgacctgtcgcccaagggcgagccgttgtatggcaagacgccggaagatagggcgctggtggagcagtggctggaagtcgagtcccagaacttcaaccctccaatctcgaccatcgtgttccagctggtgttcagcaagttccgtgggctgacccctgaccaggaggtcgtggagtccaacctgaagaaactggactcagtactagctatctacgaatcgcacctagcatcgcaggactacctggccggctctttcttctccctagctgacttgagccacgttccttacctccactatctcatcaacgtggccaagaagggggacgtcgtgacttccaagaagaacgtctccgcttggtgggaaaagataagcagcaggccagcatggcaagaggtggtggcagctgccgctgcagcgccg

SEQ ID NO: 517 - protein, 270 aa, Artificial Sequence
  Description of Artificial Sequence: Synthetic polypeptide
MLELYTHPMSPCAQKVRIVLAEKKLEWIKHHVDLSQKENLRPEYLKLNPLGVVPTLVHDGRPVIESSVICEYLDDAYPVIRLKPSSAYALANMRLWMKHVDNKLHPSCGALQWPLVMRPALMEKGEEEREALLARIPEKPRRERQRRLVKFGLEAPDVVDAVHVYRRTILDMEAALAQHHWMVGDVFSLADVCLAPYFQTVLQFGWTAMYDDCPRVADWFSRCRERESYEGSVTRDFAPEVQVDLLTMGESAWRTIRTHLASFDDSGAIA

SEQ ID NO: 518 - DNA, 810 bp, Artificial Sequence
  Description of Artificial Sequence: Synthetic polynucleotide
atgctggagctgtacacccacccgatgagcccgtgcgcccagaaggtgcgcatcgtgctggcggagaaaaagctggagtggatcaagcatcacgtcgacctgagccagaaggagaacctccgcccggagtacctgaagctcaatccgctgggcgtcgtgccgaccctggtccacgacggccgcccggtcatcgagagctccgtcatctgtgagtacctggacgacgcgtacccggtgatccggctgaaacccagctccgcctatgccctggccaatatgcgtctgtggatgaagcacgtcgataacaagctgcacccgtcgtgtggcgccctgcagtggccgctcgtgatgcggccggcgctgatggagaaaggcgaagaagagcgcgaggccctgctggcccgcatcccggagaagccgcgccgtgaacgtcagcggcgcctcgtcaagttcggcctggaagcccccgatgtggtcgatgcggtccatgtctaccgccggaccatcctggacatggaagccgccctcgcgcagcatcactggatggtcggcgacgtgttctcgctggccgatgtctgcctggccccctacttccaaacggtcctccaattcggctggaccgcgatgtacgatgactgtccccgcgtcgccgactggttctcccgctgccgcgaacgcgaaagctacgagggctcggtcacccgtgacttcgcccccgaagtgcaggtggacctgctgaccatgggcgaaagcgcgtggcgcaccatccgtacccatctggcctcgttcgacgactcgggggcgatcgcg

SEQ ID NO: 519 - protein, 267 aa, Artificial Sequence
  Description of Artificial Sequence: Synthetic polypeptide
MLFLHHSPVSVSSQKVRMALAEKGLEWTDCIVDLLTGEHCQPAFRHLNEWAEVPVLMHGDMTLVDSWLICEYLDDVVPQTPLMPATPHDRYLARHWNLWIEREVHEATGMLTYAVMGQPLLAQLDAQRIAVLLDAIPDVRVRAWRATVLEKGLDAPGLADAVLKIRRFVQRMESMLDGPHGWLAGNAFSLADVAALPYLMRAEHLGLGSLMTFEDHPLVRSWYLRMQSRPSMQPSLVRYFDADTQALMMRLVVDAQPKLEALVRATA

SEQ ID NO: 520 - DNA, 801 bp, Artificial Sequence
  Description of Artificial Sequence: Synthetic polynucleotide
atgctgttcctgcaccattccccggtgagcgtgagcagccagaaggtccgcatggccctcgccgagaagggcctggagtggaccgactgtatcgtcgacctgctgaccggggagcactgccagccggccttccgccatctgaacgagtgggccgaggtgcccgtcctgatgcacggggacatgaccctggtcgacagctggctgatctgcgaatacctggacgacgtcgtgccccagacgccgctgatgcccgccaccccgcatgaccgctacctggcccgccactggaacctctggatcgagcgcgaagtgcacgaggccaccggcatgctcacctacgccgtcatgggccagccgctcctcgcccagctcgatgcgcagcgtatcgccgtgctgctcgatgcgatcccggatgtgcgcgtccgcgcgtggcgtgccacggtcctggaaaagggcctggacgcgccgggtctggcggacgccgtcctgaaaatccgccgcttcgtgcagcgtatggaatcgatgctggacggcccccacggctggctggccgggaatgccttctccctcgcggacgtggcggcgctgccctacctgatgcgcgccgaacatctcggcctgggtagcctgatgacgttcgaggatcatccgctcgtccggagctggtacctgcgcatgcagtcgcgcccgtcgatgcaaccgagcctggtccggtacttcgacgccgacacgcaagcgctcatgatgcgcctggtggtcgacgcccagccgaaactggaagccctggtgcgggccacggcg

SEQ ID NO: 521 - protein, 208 aa, Artificial Sequence
  Description of Artificial Sequence: Synthetic polypeptide
MKRGDKVKLYTSVGPNPRMVRMFLAEKGLKLETVEVDLRGGENRRAPYLQVNPAGQTPALELDDGTCLTEITAICEYLEEVQPEPPLIGRTPQERAIVRMWTRRIDLKICEPMANGFRFGEGLPMFEARMRCLPEASAGLKAIARDGLEWLEGQFQGPWIVGERFTLADVLLFSFLDFGAMVGQPLDPAFARLTDWFARVKERPSTAA

SEQ ID NO: 522 - DNA, 624 bp, Artificial Sequence
  Description of Artificial Sequence: Synthetic polynucleotide
atgaagcggggcgacaaggtcaagctgtatacctccgtgggcccgaacccgcggatggtccggatgttcctggccgagaagggcctcaagctggaaacggtcgaggtggatctgcgcggcggcgaaaaccgccgcgccccgtatctccaggtcaaccccgccgggcaaacccccgccctggagctggacgatggcacctgcctgaccgagatcaccgcgatctgcgagtatctcgaagaggtgcaaccggaaccgccgctgatcggccgcacgccgcaggagcgtgccatcgtgcgcatgtggacccggcgcatcgacctgaaaatctgcgagccgatggcgaacggcttccgcttcggcgagggtctgcccatgttcgaagcgcgcatgcgctgcctcccggaagcctccgcgggtctcaaggccatcgcccgcgacggtctggagtggctggaaggccagttccagggcccgtggatcgtcggcgagcgcttcaccctggccgacgtgctcctgttcagcttcctggacttcggggcgatggtgggccagccgctggacccggccttcgcgcgcctgaccgactggttcgcgcgtgtgaaggaacggccctccaccgccgcg

SEQ ID NO: 523 - protein, 207 aa, Artificial Sequence
  Description of Artificial Sequence: Synthetic polypeptide
MMLKLFYTPGSCSLASHIALEEAGAAYEAHRVDFSKAEQTKPEYLAINPKGRVPALATDRGTLTETPAILVYIAQTFPGARLAPIDDPFEFARLQSFLSYLCSTVHVAHAHGRRGARWADDPAAHEAMKAKVSKNMADCFAMIEGTMFAGPFVMGENYSIADPYLFTIASWLEGDGVDPAQFPKILGHRNRMTERPAVAKVLQVVRS

SEQ ID NO: 524 - DNA, 621 bp, Artificial Sequence
  Description of Artificial Sequence: Synthetic polynucleotide
atgatgctgaagctcttctacaccccgggctcctgcagcctggcctcccacatcgcgctcgaagaagccggggccgcgtatgaggcgcaccgggtggacttctccaaggcggagcagaccaagccggagtacctggccatcaacccgaaaggccgcgtgccggcgctggcgaccgatcgcggcaccctgaccgaaacccccgccatcctggtgtacatcgcccaaaccttccccggtgcccgcctggcgccgatcgacgatcccttcgagttcgcgcgcctccaatccttcctgagctacctgtgcagcaccgtccacgtcgcccatgcccatggccgtcggggcgcccgttgggccgacgatcccgcggcccatgaggccatgaaggccaaggtcagcaagaacatggccgactgcttcgcgatgatcgaagggaccatgttcgcgggcccgttcgtgatgggcgagaactactcgatcgccgacccgtacctgttcaccatcgcgtcgtggctggaaggcgacggcgtcgacccggcgcaattcccgaagatcctggggcatcgtaatcgcatgaccgagcgcccggccgtcgccaaggtcctccaggtggtgcggtcg

SEQ ID NO: 525 - protein, 267 aa, Artificial Sequence
  Description of Artificial Sequence: Synthetic polypeptide
MLTLHHSPFSVASQKVRLALAEKQLEWNDRLIDLLAGEHLSADFLQLNARAEVPVLEHDGRVLTDSWFICEYLDEAFALHPLMPAAAPDRYVARQWNQWIERELHHASGVVTYAVLARPLLLERPHEVVSALLEAIPDAKVRSWRTSVLEHGLDAPELKHCVAQYRAFFRRMEAQLGDAHAWLAGPTCSLADFAALPYVMRAEHVGLGDMMTFEEVPNVRAWYLRMLARPSMQASFVRYVDANSQSLLTQLVIAAHHKLAALVQQTA

SEQ ID NO: 526 - DNA, 801 bp, Artificial Sequence
  Description of Artificial Sequence: Synthetic polynucleotide
atgctgaccctgcaccactccccgttctccgtcgcctcgcagaaggtgcgcctggcgctcgccgaaaagcagctggagtggaacgaccgcctgatcgacctgctggccggcgaacacctgtcggccgacttcctccaactcaacgcccgcgcggaggtcccggtcctggagcatgacggtcgcgtcctcacggacagctggttcatctgcgagtacctggatgaagccttcgcgctccaccccctgatgcccgccgcggccccggaccgctacgtggcccgtcagtggaaccagtggatcgagcgcgaactgcaccacgcctccggtgtcgtcacctacgcggtgctggcccgccccctcctgctggagcgcccgcacgaagtcgtcagcgcgctgctggaagcgatcccggacgcgaaggtccgctcgtggcggaccagcgtgctggagcatggcctggatgcccccgagctgaagcattgtgtggcccagtaccgcgcgttcttccgccgcatggaagcccagctcggggacgcccatgcgtggctggccggtcccacctgctcgctggcggatttcgccgccctgccgtacgtcatgcgcgccgaacacgtgggcctgggcgacatgatgacgttcgaggaagtgccgaacgtccgggcctggtacctccgcatgctcgcgcgcccctcgatgcaggcctccttcgtgcggtacgtggacgcgaactcgcagtccctcctcacccagctggtcatcgcggcgcatcataagctcgccgcgctcgtccagcaaaccgcc

SEQ ID NO: 527 - protein, 261 aa, Artificial Sequence
  Description of Artificial Sequence: Synthetic polypeptide
MKLYHGWLSSASRRVRLCLAEKGLAYESIPIDMGKQEHHSPAYLAMNPNGVVPALRLDNGASLYESSTICEYLDDVHPQPPLRPADAYDRAVMRNFVRWTDEKSLPHLLVLNWSIALQPGASQWSDAQLKERLERIPTPERREAWTRIARQPYTDEEKAVALEKLLALLGKMEAMLADSGDWLVGGAYSLADIAAVPFVARIAELAPDALSHDRCPRTAGWWARVQQRPAFALARFDRFDAALRQRDAAAALSPAPARAGS

SEQ ID NO: 528 - DNA, 783 bp, Artificial Sequence
  Description of Artificial Sequence: Synthetic polynucleotide
atgaagctgtaccatggctggctgtcctcggcctcccgtcgcgtccgcctctgcctggccgagaagggtctggcgtatgagtccatccccatcgacatgggtaagcaggaacatcactcgccggcctacctggcgatgaaccccaacggcgtcgtccccgccctgcgcctggataacggcgccagcctctacgagagcagcaccatctgcgagtacctggatgacgtccacccgcagcccccgctgcgccccgccgacgcgtacgaccgggccgtgatgcggaacttcgtgcgttggaccgatgaaaagtccctgccgcatctcctggtcctgaattggagcatcgccctgcagccgggcgccagccagtggtcggacgcccagctgaaggaacgcctggagcgcatcccgacccccgaacgtcgggaagcctggacgcgcatcgcgcgccagccgtacacggacgaagagaaggccgtcgccctggagaagctcctggccctgctgggcaagatggaggcgatgctcgccgattcgggcgactggctggtgggtggggcgtacagcctcgccgacatcgccgccgtgccgttcgtggcccggatcgcggagctcgccccggacgccctgtcgcatgaccgctgtccgcgcaccgccggctggtgggcccgcgtccagcagcgcccggccttcgcgctggcccggttcgaccggttcgacgccgcgctgcgtcaacgggacgccgccgcggccctctccccggccccggcccgcgccggctcg

SEQ ID NO: 529 - protein, 267 aa, Artificial Sequence
  Description of Artificial Sequence: Synthetic polypeptide
MLTLHHSPFSVASQKVRLALAEKQLEWNDRLIDLLAGEHLSADFLQLNARAEVPVLEHDGRVLTDSWFICEYLDEAFAQHPLMPAAAPDRSVARQWNQWIERELHHASGVVTYAVLARPLLLEQPHEVVSALLEAIPDSKVRAWRTSVLEHGLDAPDLKHCVGQYRAFFRRMEAQLGDAHAWLAGPTCSLADFAALPYVMRAEHVGLGDMMTFEEVPNVRAWYLRMLARPSMQASFVRYVDANSQSLLTQLVIAAHHKLAALVQQTA

SEQ ID NO: 530 - DNA, 801 bp, Artificial Sequence
  Description of Artificial Sequence: Synthetic polynucleotide
atgctcacgctccaccacagccccttctccgtcgcctcgcagaaagtgcgcctggcgctggcggaaaagcaactggagtggaacgaccgcctgatcgacctgctcgccggcgaacacctgagcgcggatttcctgcagctcaacgcccgggccgaggtcccggtcctggaacacgatggccgcgtcctcaccgactcctggttcatctgcgaatacctcgacgaagccttcgcccaacatccgctgatgcccgccgccgcgccggatcgttcggtcgcgcgccaatggaaccagtggatcgaacgcgagctccaccacgcctcgggggtcgtcacctacgccgtcctggcccggcccctcctgctcgaacagccccatgaggtcgtgtccgcgctcctggaagccatcccggacagcaaagtgcgggcctggcgcacgagcgtcctggagcacggcctggacgccccggacctgaaacattgcgtgggccagtatcgcgcgttcttccggcgcatggaggcccagctgggtgacgcccatgcgtggctggccgggcccacctgttcgctcgccgatttcgccgccctcccctacgtcatgcgcgccgagcatgtgggcctgggtgacatgatgaccttcgaggaagtcccgaacgtccgcgcgtggtacctccgcatgctggcccgcccgagcatgcaagccagcttcgtgcgctacgtggacgcgaatagccagtcgctgctgacgcagctcgtgatcgccgcccatcacaagctggccgcgctggtgcaacagacggcc

SEQ ID NO: 531 - protein, 260 aa, Artificial Sequence
  Description of Artificial Sequence: Synthetic polypeptide
MAYVLYNAPQSTCSQRVRFVLNAKGLAFEEHKLDLFAGDQLKPDYLAINPNGVVPALLDDGEAVVDSAVIIEYLDETRPHPEPLRPADALGLARMRSLMRFIDEVPTPAIRVPSYNLAFLPHFQKMSEEEFLDLANSKPLRKEFLLTMGRTGFPESEMNSAMDRLRRGIERMDKVLAESGGPWLMGSRLSLADIAVMPVIVRMDDINLDHMWDDRPAVARWFEAIRSHPAYKPTYYHGALLTEKYPHLREQLASKKAGPA

SEQ ID NO: 532 - DNA, 780 bp, Artificial Sequence
  Description of Artificial Sequence: Synthetic polynucleotide
atggcctacgtcctgtacaacgccccgcagtccacctgctcccaacgcgtccgcttcgtcctgaacgcgaagggcctggccttcgaagaacataagctcgacctgttcgccggggatcagctgaagcccgactatctcgccatcaacccgaacggcgtcgtcccggccctgctggacgatggcgaagccgtggtggattccgccgtgatcatcgaatacctggatgagacgcgcccgcacccggaaccgctccgtcccgcggacgcgctgggcctggcgcgtatgcgctcgctgatgcgcttcatcgatgaagtcccgacgccggcgatccgtgtgcccagctataacctggcgttcctgccgcacttccagaagatgtcggaggaggagttcctggacctggccaactcgaagccgctgcggaaggagttcctcctcaccatgggccgcacgggcttccccgaatccgagatgaacagcgccatggaccgcctgcgccgcggcatcgagcgcatggacaaggtcctcgccgagagcggtggtccgtggctgatgggctcgcgcctgagcctcgccgacatcgcggtcatgcccgtcatcgtgcgcatggatgacatcaacctcgaccacatgtgggacgaccgcccggccgtcgcccgttggttcgaagcgatccgtagccatcccgcctacaagcccacctactatcacggcgccctgctcaccgagaagtacccgcatctgcgcgagcagctggccagcaaaaaggcgggcccggcg

SEQ ID NO: 533 - protein, 255 aa, Artificial Sequence
  Description of Artificial Sequence: Synthetic polypeptide
MAQVTLYHWEPNANSGKPMLTLMEKGVEFDSHYIDMLEFDQHRPEYLAINPQGTIPAMTHGSRVLVESTAIMEYVNEEFSGPDLMPKDALDRWRVRWWMKFMDQWLAPSFSMIGWSVFVGPMVRQRDPAELEAAIERIPLPERRVSWRKAIHGTFSEAEIGESQRRVALGIGMLEQELGKREWLASDAYSLADINGFNLAYAIPLSQPSLCNDERTPNLLRWLRAVYARPAVKKCWALGRTDMVKRVAILDGEQI

SEQ ID NO: 534 - DNA, 765 bp, Artificial Sequence
  Description of Artificial Sequence: Synthetic polynucleotide
atggcccaggtgaccctgtaccactgggaaccgaacgccaactccggcaagcccatgctcaccctgatggagaagggcgtggagttcgactcgcattacatcgacatgctggagttcgaccagcaccgccccgagtatctggccatcaacccgcagggtaccatcccggcgatgacccacggtagccgcgtgctggtggaaagcacggccatcatggagtacgtcaacgaggagttcagcgggccggatctgatgcccaaggacgcgctggatcggtggcgggtgcggtggtggatgaagttcatggaccagtggctggccccgagcttctcgatgatcggttggtcggtgttcgtgggccccatggtgcggcaacgcgacccggccgaactggaggccgccatcgaacgcatcccgctgcccgaacgtcgggtcagctggcgcaaggccatccatgggaccttctcggaggccgaaatcggcgagtcgcaacgccgcgtcgccctgggcatcggcatgctggagcaggagctgggcaagcgcgagtggctggcctcggatgcgtacagcctcgccgacatcaatgggttcaatctggcctacgccatcccgctgagccagcccagcctctgtaacgacgaacggaccccgaacctgctgcgctggctgcgcgccgtctatgcccgtccggccgtgaaaaagtgttgggccctgggccgcaccgatatggtcaagcgcgtggccatcctggacggcgagcagatc

SEQ ID NO: 535 - protein, 260 aa, Artificial Sequence
  Description of Artificial Sequence: Synthetic polypeptide
MAMILYHGAPNGPSLIVLAALAETGVAVERRRIDLLAGDRHVLPGISEPVALNMGIEGEGPVLVVDGEAMTDAVFLAQYFDELSEKASLQPSDPYAHWEMMMWCRQITERLSPAAALLGNVEFSQETLGAMSDEQFEELTDRIVSADLRSRWEILRDGAVDLAQITDSRTKVLQAVERCEQQLGDGREWLMGELTIADLTTFAWLAGMEQVLPESFRDKPLTTAWLQRVRSRPAVASALADGGARAATFWAPGPEINRWG

SEQ ID NO: 536 - DNA, 780 bp, Artificial Sequence
  Description of Artificial Sequence: Synthetic polynucleotide
atggcgatgatcctctaccacggcgccccgaatggcccgagcctgatcgtcctggcggccctcgcggagaccggtgtggccgtcgaacgccgtcgcatcgacctgctcgccggtgaccgccacgtgctccccggcatcagcgagcccgtcgccctgaacatgggtatcgagggggaaggcccggtgctggtggtggacggcgaggcgatgacggacgccgtgttcctggcgcagtatttcgacgagctgagcgagaaggccagcctgcagccgagcgacccgtacgcccattgggagatgatgatgtggtgccggcagatcaccgagcgcctgtcgccggccgcggcgctgctgggcaacgtggagttctcgcaggagaccctgggcgcgatgagcgatgaacagttcgaggagctgaccgaccggatcgtgtcggccgacctccggtcccgctgggagatcctgcgggacggtgcggtcgacctcgcccagatcaccgactcccggaccaaagtcctgcaagccgtggagcgctgtgagcagcagctgggcgacggccgcgagtggctgatgggcgagctgacgatcgcggacctgacgaccttcgcctggctcgccggcatggaacaggtcctgccggagtccttccgcgacaaacccctgaccaccgcctggctgcagcgcgtccggtcgcggcccgccgtggcgtcggcgctcgccgatggcggcgcccgcgccgccacgttctgggcgccgggccccgagatcaatcgctggggg

SEQ ID NO: 537 - protein, 250 aa, Artificial Sequence
  Description of Artificial Sequence: Synthetic polypeptide
MLTLYSFGPGANSLKPLLALYEKGLEFTPRFVDPTRFEHHEEWFKKINPRGQVPALDHDGHIITESTVICEYLEDAFPEAPRLRPVDPVMIAEMRVWTKWVDEYFCWCVSTIGWERMIGPMARALSDEEFEAKVARIPVPEQRTKWRTARTGFPKEVLDEEMRKIGVSVNRLETRLAESPWLAGENFSLADVCNFAIANGMQNGFSDIVNREATPHLVAWIEKINDRPACKAMFANSKSEFADRGQKVTA

SEQ ID NO: 538 - DNA, 750 bp, Artificial Sequence
  Description of Artificial Sequence: Synthetic polynucleotide
atgctgaccctgtactccttcggcccgggcgccaacagcctgaaaccgctcctggcgctctatgagaaggggctggagttcaccccgcggttcgtcgacccgacccgcttcgaacaccatgaggagtggttcaagaagatcaacccgcgcggccaggtcccggcgctggaccatgacggccacatcatcaccgaatcgacggtgatctgcgaatacctggaggacgcgttcccggaagcgccgcgcctgcgcccggtggacccggtcatgatcgccgagatgcgcgtgtggaccaagtgggtcgacgagtatttctgctggtgtgtgagcaccatcggctgggagcggatgatcgggcccatggcccgtgcgctgagcgatgaggagttcgaagcgaaggtcgcgcgcatcccggtcccggaacagcgcaccaagtggcggaccgcccgcaccggcttcccgaaggaggtcctggatgaggagatgcgcaagatcggcgtgagcgtgaaccgcctggagacccggctcgccgagtcgccctggctcgccggggaaaacttctcgctcgcggacgtgtgtaatttcgccatcgcgaacggcatgcagaacgggttcagcgatatcgtcaaccgggaagcgaccccgcatctggtggcctggatcgagaagatcaacgatcgcccggcctgcaaggcgatgttcgcgaacagcaagtccgagttcgcggaccgtggccaaaaagtcacggcg

SEQ ID NO: 539 - protein, 257 aa, Artificial Sequence
  Description of Artificial Sequence: Synthetic polypeptide
MVIPLGEDNTIMLKLYSFGPAANSMKPLLTVFEKGLDVEKHRLDPAKFEHHTDWFKAINPRGQVPALVDGDKVVTESTVICEYLEDEYPTEVALRPADSFGKAQMRIWTKWVDEYFCWCVSTIGWHRYVGNMVKSLSDAEFEEKVKAIPVIEQQVKWRRAREGFPQDMLDEEMRKIAYSVRKLDDHLADHEWLVPGQYTLADICNFAIANGMQFGFAELVNKQDTPHLVRWIEQINERPAVKQMFAQVELEKLGPRE

SEQ ID NO: 540 - DNA, 771 bp, Artificial Sequence
  Description of Artificial Sequence: Synthetic polynucleotide
atggtgatcccgctcggcgaagacaacaccatcatgctcaagctgtactcgttcggccccgccgcgaacagcatgaagcccctcctgacggtgttcgagaaggggctcgacgtcgagaagcaccgtctggaccccgccaagttcgagcatcacacggactggttcaaggccatcaatccgcgtggtcaagtccccgccctggtcgacggcgataaggtggtgaccgaatccaccgtgatctgcgaatacctggaggacgaatatccgaccgaggtggccctgcgtccggccgactcgttcggcaaggcccagatgcgtatctggaccaagtgggtggacgaatacttctgctggtgcgtctcgacgatcgggtggcaccgctacgtcggcaacatggtcaaatccctgagcgatgccgagttcgaggagaaggtcaaggcgatcccggtgatcgagcaacaggtgaagtggcgccgcgcccgcgagggcttcccccaagatatgctggacgaggagatgcgcaagatcgcctacagcgtccgcaaactcgacgaccatctggcggaccatgagtggctggtgccgggtcaatataccctggcggacatctgcaatttcgccatcgcgaatgggatgcagttcgggttcgccgagctcgtcaacaaacaagacaccccgcatctcgtccgctggatcgagcagatcaacgaacggcccgcggtcaagcagatgttcgcccaggtcgaactggaaaagctcggcccgcgcgag

SEQ ID NO: 541 - protein, 258 aa, Artificial Sequence
  Description of Artificial Sequence: Synthetic polypeptide
MALKYYHAEPLANSLKSMVPLKEKGLAYESIYVDLHKFEQHQPWFTAINPEGQVPVLDHDGTIITHTTVINEYLEDAFPDAQPADAPLRPRDPVGAARMRYWNKFIDEHVMNYVSMHGWHRMVGVIARNIASGDFEKLLESIPLPDQRKKWATARSGFSEADLANATAKIEYALDKVEKQLGETKWLAGDTYTLADINFYSHCGAMVERMFPEMEVARRAPRLCEWRDRVAARPAVAEALKSEDRTAPGLRVWSGEVR

SEQ ID NO: 542 - DNA, 774 bp, Artificial Sequence
  Description of Artificial Sequence: Synthetic polynucleotide
atggcgctcaagtactaccatgcggaaccgctcgccaacagcctgaagtcgatggtccccctgaaggagaagggcctggcgtacgaatccatctacgtggacctccataagttcgagcagcaccagccgtggttcaccgcgatcaatccggaagggcaggtgccggtgctggaccacgacggcaccatcatcacccacacgaccgtcatcaacgaatacctggaggacgcgttccccgatgcccaacccgcggacgccccgctccgtccccgtgacccggtgggcgcggcgcgtatgcggtattggaacaaattcatcgacgagcacgtcatgaactatgtgagcatgcacgggtggcaccgcatggtgggcgtcatcgcccgcaacatcgccagcggggacttcgagaagctgctggagagcatcccgctgcccgatcagcggaagaagtgggccaccgcgcgctccggtttcagcgaagcggacctggcgaacgccaccgccaagatcgaatacgcgctcgacaaggtggagaagcaactgggcgagaccaaatggctggccggggacacgtacaccctggccgatatcaacttctatagccactgcggtgcgatggtggagcgcatgttcccggagatggaggtcgcccgccgtgcgccgcgtctctgcgagtggcgggatcgcgtggccgcccgcccggcggtcgcggaagccctcaagtccgaggaccgcaccgcccccggcctccgcgtctggtccggcgaagtgcgt

SEQ ID NO: 543 - protein, 261 aa, Artificial Sequence
  Description of Artificial Sequence: Synthetic polypeptide
MSALLYHGEPNGASLTVLAALAETGLDIECRRIDLLAGERHSLPGIVDPVALDLSIEGEGPVLVIDGEAMTESVFLAQYLDEAAGGVGLQPTDAYARWEMMMWCRQITERLSPAAALLGNLATSQSAIAAIPAEDFAILAARIVSDDLRERWQALNDDAVNAAQVADSETKVAAAVDRCEKQLGDGREWLMGTFSIADLVTYSWLAGMEPLRPAAFADAPLVKAWLARTAARPCVQAALARATISEPLRAWAPGPEINRWG

SEQ ID NO: 544 - DNA, 783 bp, Artificial Sequence
  Description of Artificial Sequence: Synthetic polynucleotide
atgtccgccctgctctaccatggcgaaccgaacggggcctccctcaccgtgctcgcggccctggcggaaacgggcctggatatcgagtgccgccggatcgacctgctggccggtgagcgccattccctcccgggcatcgtggacccggtggcgctggacctgtcgatcgagggggagggtcccgtcctggtgatcgatggcgaggccatgaccgaatccgtgttcctggcccagtacctcgacgaagccgccggtggggtgggcctgcagccgaccgacgcgtatgcccgctgggagatgatgatgtggtgccgccagatcacggagcgtctgagcccggccgccgcgctgctgggcaacctggccacgtcccagtccgcgatcgccgccatcccggccgaggacttcgcgatcctggccgcgcgcatcgtcagcgacgatctccgcgagcgctggcaagccctgaacgacgatgccgtgaacgcggcccaggtcgccgacagcgaaaccaaggtcgccgccgcggtggatcgctgtgagaagcagctcggcgacggccgcgagtggctcatgggtaccttctcgatcgccgacctggtcacctactcctggctggccggcatggaaccgctgcgccccgccgcgttcgcggatgcgcccctcgtcaaagcctggctcgcccggaccgccgcccgtccctgcgtgcaggcggcgctcgcccgtgccaccatctcggaaccgctccgcgcctgggccccgggtccggagatcaaccgctggggt

SEQ ID NO: 545 - protein, 256 aa, Artificial Sequence
  Description of Artificial Sequence: Synthetic polypeptide
MDEVSLYHWEPNANSGKPMLALMEKGVPFSSHYIDMLQFDQHKPEYLAINPQGTIPAMTHNGQVLTESTAIMEYVNDRFDGPDLMPADAQDRWRVRWWMKFMDQWLGPSFSMIGWSVFVGPMVRQRDPAELAAAIDRIPLPERRTAWRKAINGDFSESEMAESRRRVGLGIAKLEEELGKRPYVGSNQYSLADINIFNSTYSLPISQPDLAGKDRTPNIMRWLKRVYTREAVKKTWAMGKTDLAHRYGLIMAEIEG

SEQ ID NO: 546 - DNA, 768 bp, Artificial Sequence
  Description of Artificial Sequence: Synthetic polynucleotide
atggatgaggtgagcctctaccattgggagccgaatgccaattccggcaagcccatgctggccctcatggaaaagggtgtgccgttctcctcgcactatatcgacatgctgcagttcgaccagcataagccggagtacctggccatcaatccgcagggcaccatccccgcgatgacccacaatggccaagtgctgaccgagagcaccgcgatcatggagtacgtgaacgaccggttcgacggcccggatctcatgccggccgacgcccaagaccgttggcgcgtccgctggtggatgaagttcatggatcaatggctgggccccagcttctccatgatcggctggtccgtcttcgtcggcccgatggtccgtcaacgcgatccggccgagctcgccgccgccatcgatcgcatcccgctcccggaacggcgtaccgcgtggcggaaggccatcaatggtgacttctccgagtcggagatggccgaaagccgccgccgtgtcggtctcgggatcgccaagctggaagaggagctgggcaagcggccctacgtcggtagcaaccagtatagcctggcggacatcaacatcttcaactcgacctattccctgccgatcagccaaccggacctggcgggcaaggatcggacccccaacatcatgcgctggctgaagcgtgtctatacccgggaagcggtcaagaagacctgggcgatgggcaagaccgacctggcccaccgctacggtctgatcatggccgagatcgagggc

SEQ ID NO: 547 - protein, 214 aa, Artificial Sequence
  Description of Artificial Sequence: Synthetic polypeptide
MKLVLHGYFRSGTSYRTRLALNWKGVPYEYVGVNLVEGEQHSDAYKAKNPQGLVPALEVDGEILTQSVAILEWIEETFPDRPLLPSDPIKRAKVRAFAAAIGCDIHPLQNLRILKKARELAGDDPEAGPAWARHWISLGFEALEKLAEQGDGQNGFLFGDGPTLAEIYLLPQMFNARRFGVDLTPYPRLVAADEAARAQPEFERAAPENQPDAV

SEQ ID NO: 548 - DNA, 642 bp, Artificial Sequence
  Description of Artificial Sequence: Synthetic polynucleotide
atgaagctggtgctgcatgggtacttccggagcggcaccagctatcgtacgcgcctggccctgaactggaagggcgtgccctacgagtacgtgggcgtgaatctggtcgagggggagcagcattccgacgcctacaaggccaagaacccgcaaggtctcgtcccggccctggaggtcgacggcgaaatcctgacccagtccgtcgccatcctggagtggatcgaggagacgttcccggaccgccccctgctgccgtccgacccgatcaagcgtgccaaggtccgcgcgttcgccgccgccatcggttgtgacatccatccgctgcaaaacctgcgcatcctgaagaaggcccgggagctggccggcgatgacccggaagccggtccggcctgggcgcgtcactggatctcgctgggcttcgaggcgctggagaagctggccgagcagggggacggccaaaacgggttcctgttcggcgatggcccgacgctcgccgaaatctacctgctcccccaaatgttcaacgcccgccgcttcggcgtcgatctcaccccgtacccgcgtctcgtggcggccgacgaagcggcccgtgcccagcccgagttcgagcgcgccgcccccgagaatcagccggacgccgtg

SEQ ID NO: 549 - protein, 205 aa, Artificial Sequence
  Description of Artificial Sequence: Synthetic polypeptide
MLKLYYAPGTIATASVMCLRETGLEHELVALDFTQSAQMTPEYQRINPKGRVPALDLGGEILTETGAILEYLAALAPEKGLVPEDPLKAARMREVMFYLASTMHVNHAHKRRGHRWADKEESRADMSAKVPQTMTESARYMEENVITGPYLFGDELCVADFYFYAICNWLEGDRVDVTQFPKIGSFRQAMRELASVAATHDDNIL

SEQ ID NO: 550 - DNA, 615 bp, Artificial Sequence
  Description of Artificial Sequence: Synthetic polynucleotide
atgctgaagctgtattacgccccgggcaccatcgccaccgccagcgtgatgtgtctgcgcgagaccggcctggaacacgaactcgtggccctggacttcacccagtccgcgcagatgacccccgagtatcagcgtatcaacccgaagggccgcgtcccggcgctggatctgggcggtgaaatcctcaccgagaccggtgccatcctcgaatacctggccgccctggccccggagaagggcctggtgccggaagacccgctcaaagccgcccgtatgcgggaagtcatgttctacctcgccagcaccatgcacgtcaatcacgcgcacaaacgtcgcggccatcggtgggccgataaggaagaatcccgtgcggacatgtcggcgaaagtcccccagaccatgaccgagtccgcgcggtacatggaggagaacgtgatcaccggtccctacctcttcggcgacgaactgtgcgtcgcggacttctatttctacgccatctgcaactggctggagggcgaccgtgtggatgtgacgcaattcccgaagatcggtagcttccgccaggcgatgcgcgaactggcgagcgtggcggcgacccatgacgacaatatcctg

SEQ ID NO: 551 - protein, 204 aa, Artificial Sequence
  Description of Artificial Sequence: Synthetic polypeptide
MKLYYAKGTISIAAVIALHEAGLDFEPVRLDFRAGEQSGAAYLAINPKGRVPTLVTDRGILTETGALLDYIADIAPQAELRPTDPYQAAKMREAMYYIASTMHVNHAHKMRGHRWADQQSSFDDMKTKSVQTMTDSATYVEHNLITGPFVTGDTLTLADPYLYVACNWLEGDGVKLAEFPKIAAFMQAMRARPSVARVIADDMI

SEQ ID NO: 552 - DNA, 612 bp, Artificial Sequence
  Description of Artificial Sequence: Synthetic polynucleotide
atgaagctgtactacgccaagggcacgatctcgatcgccgccgtcatcgcgctccatgaagccggtctggatttcgagccggtccgtctggacttccgggccggggagcaatcgggcgccgcctatctggccatcaatccgaaaggccgcgtcccgaccctggtcaccgaccgtggcatcctgaccgaaaccggggccctcctcgactacatcgcggacatcgcgccccaggcggaactgcgtccgaccgacccgtaccaggcggcgaaaatgcgggaggccatgtactacatcgcctcgaccatgcacgtgaaccatgcgcacaagatgcgggggcatcgctgggccgaccagcagtcgtcgttcgacgacatgaagaccaagagcgtgcagaccatgaccgacagcgccacctacgtcgaacacaatctgatcacgggtcccttcgtgaccggcgacaccctcaccctcgccgacccgtacctgtacgtggcctgtaattggctggagggcgatggcgtgaagctggccgagttcccgaagatcgccgcgttcatgcaggccatgcgggcgcgtccgtccgtggcccgcgtcatcgcggacgacatgatc

SEQ ID NO: 553 - protein, 204 aa, Artificial Sequence
  Description of Artificial Sequence: Synthetic polypeptide
MQLYYSPGTISVAVAIALEEAGLDYEAVKIDFANKEQLSPAYAQINPKARVPALAVEGGILTETGALLDYIADVAPTAGLRPSDPVLLARMREVMYYLASTMHVNHAHKLRGSRWASKTSSYKDMQAKVPQTMAESCAHLSQYGLRGPFVLGDEVSLADCYLYVVCTWLEGDGVTLADFPKIQSFMTAMEQRDSLRAVYAKDML

SEQ ID NO: 554 - DNA, 612 bp, Artificial Sequence
  Description of Artificial Sequence: Synthetic polynucleotide
atgcaactctactacagcccgggcacgatctccgtggccgtcgccatcgcgctggaagaagccggcctggattatgaggcggtcaagatcgacttcgccaacaaggaacagctgtcgccggcctatgcccagatcaatccgaaggcgcgcgtgccggccctggcggtggagggtggcatcctgaccgagacgggtgcgctgctcgattacatcgccgatgtggcccccaccgccggtctccggccgtccgacccggtcctgctggcccggatgcgcgaggtcatgtactacctggcgagcaccatgcacgtcaaccacgcccataaactgcgcgggtcccggtgggcctccaagacctcctcctacaaggatatgcaggccaaggtcccgcagaccatggccgaatcgtgcgcccatctcagccagtacggtctccgcggcccgttcgtgctgggcgacgaagtgagcctggccgactgttacctctacgtggtctgtacgtggctggaaggcgacggcgtgaccctcgccgacttccccaagatccagtcgttcatgaccgcgatggagcaacgcgatagcctgcgggccgtgtacgccaaggatatgctg

SEQ ID NO: 555 - protein, 209 aa, Artificial Sequence
  Description of Artificial Sequence: Synthetic polypeptide
MKLYDYAAAPNPRRVRIFLAEKNIEIETVQIDLRKFEQKSEAFLKISPLGEVPLLQLDDGTCISQVHAICRYIEEAYPENPLLGRTPLEKALVESSNHQLNMNGIAAVTEGFRNSSPVFEGRAIAGPNAYEQIPALAERGLLRIDHLFRDLDAHFANSQFIIGDYFSVADITAFTTMDFARWVKKTIPEDCVNLQRWYDQVNARPSAKA

SEQ ID NO: 556 - DNA, 627 bp, Artificial Sequence
  Description of Artificial Sequence: Synthetic polynucleotide
atgaagctgtatgattatgccgcggccccgaatccgcgccgcgtgcgcatcttcctggccgagaagaacatcgaaatcgagaccgtgcagatcgacctgcgcaagttcgagcagaagagcgaagccttcctgaaaatcagcccgctgggtgaggtcccgctgctgcagctcgacgacggcacctgcatcagccaggtccatgccatctgccggtacatcgaggaagcgtaccccgaaaatcccctcctcgggcgtacgccgctggagaaggccctggtggaatcgtcgaaccaccagctgaacatgaatggcatcgccgccgtgaccgaaggcttccggaatagctccccggtcttcgagggccgtgcgatcgcgggtcccaatgcctacgagcagatccccgccctggccgaacgcgggctgctgcgtatcgaccatctgttccgggatctggacgcccacttcgcgaacagccagttcatcatcggcgattacttctccgtcgccgacatcacggccttcaccacgatggatttcgcccgttgggtcaagaagacgatcccggaagattgtgtcaatctgcagcgctggtatgaccaggtcaacgcgcgtccgagcgcgaaggcc

SEQ ID NO: 557 - protein, 218 aa, Artificial Sequence
  Description of Artificial Sequence: Synthetic polypeptide
MLRPISDISMGGKDMQLYYAPRTISVAVAIALDEAGIEYEAIKIDFAAKEQTGTAYAQINPKGRVPALVVEGGILTETGALLEYIADMAPDTGLRPQDPVLCARMREVMFYLASTMHVAHAHKLRGARWAKERSSWKDMQKMVPQTMADCCDYISRAGLRGPFVLGESLSLADCYLYVICTWLEGDGVTLADFPKIQSFMTAMEQRDSVREIYAKGML

SEQ ID NO: 558 - DNA, 654 bp, Artificial Sequence
  Description of Artificial Sequence: Synthetic polynucleotide
atgctgcgccccatcagcgacatcagcatgggtgggaaggatatgcagctgtattacgcgccgcgtacgatctccgtggccgtcgccatcgcgctggacgaggccggcatcgaatacgaggccatcaagatcgacttcgccgcgaaggaacagaccggcaccgcctacgcccagatcaacccgaaggggcgtgtccccgccctggtcgtcgaagggggcatcctgaccgaaacgggcgccctcctcgaatacatcgccgacatggcgcccgatacgggcctccgcccccaagaccccgtgctgtgtgcgcgcatgcgggaggtcatgttctacctcgccagcaccatgcatgtggcccatgcgcacaaactgcgtggggcgcgttgggccaaggagcgctcgtcctggaaggacatgcagaagatggtcccgcaaacgatggccgactgttgcgactatatctcccgtgcgggtctgcgcgggccgttcgtcctcggcgagagcctgtccctggccgactgctacctctacgtcatctgcacctggctggaaggggacggtgtcaccctggcggatttccccaagatccagagcttcatgaccgccatggagcaacgggactccgtccgcgagatctacgccaagggtatgctg

SEQ ID NO: 559 - protein, 204 aa, Artificial Sequence
  Description of Artificial Sequence: Synthetic polypeptide
MQLYYAPKTISVAVAIALEEAGLDYEPIRIDFAAKEQLGDAYAQINPKGRVPALVVDGGILTETGALLEYVADVAPDAGLRPTDPVLLARMREVMFYLASTMHVNHAHKLRGSRWATERSSWKDMQKMVPQTMAASCDYICQSGLRGPLVLGDALSLADCYLYVVCSWLEGDGVDVADYPKIQKFMASMDQRESIRAVTAKGML

SEQ ID NO: 560 - DNA, 612 bp, Artificial Sequence
  Description of Artificial Sequence: Synthetic polynucleotide
atgcagctgtactacgccccgaaaaccatctcggtcgccgtcgccatcgcgctggaagaagcgggcctggactacgagccgatccggatcgacttcgccgccaaagagcagctcggggatgcgtacgcccaaatcaacccgaagggccgtgtgccggccctggtggtggacggcggtatcctgaccgaaaccggcgccctgctggagtacgtggcggatgtggcgccggatgccggcctccgcccgaccgatccggtgctcctggcccggatgcgcgaggtgatgttctacctcgcgagcaccatgcatgtgaaccacgcccacaagctgcgcggctcccggtgggcgaccgaacgcagctcctggaaggacatgcaaaagatggtgccgcagaccatggccgcctcgtgcgactacatctgccaatcggggctgcgcggtccgctggtcctcggcgacgcgctgtccctggccgactgctacctctacgtcgtctgcagctggctggagggtgacggcgtcgatgtggccgactaccccaagatccagaagttcatggcctcgatggaccaacgcgagtccatccgtgccgtgaccgccaagggcatgctg

SEQ ID NO: 561 - protein, 205 aa, Artificial Sequence
  Description of Artificial Sequence: Synthetic polypeptide
MMQLYYAPKTISVAVAIALEEAGLDYEPIRIDFAAKEQLGDAYAQINPKGRVPALVVDGGILTETGALLEYVADVAPDAGLRPKDPVLLARMREVMFYLASTMHVNHAHKLRGSRWATERSSWKDMQKMVPQTMAASCDYICQSGLRGPLVVGDTLSLADCYLYVVCSWLEGDGVNVADYPKIQKFMASMDQRESVRAVTAKGML

SEQ ID NO: 562 - DNA, 615 bp, Artificial Sequence
  Description of Artificial Sequence: Synthetic polynucleotide
atgatgcagctgtattacgcgcccaaaaccatctcggtggccgtcgcgatcgccctggaggaggccgggctggattatgagccgatccgcatcgacttcgcggccaaggaacagctgggcgacgcctatgcgcagatcaatccgaagggccgcgtccccgccctggtcgtcgacggcggcatcctgacggaaaccggcgccctgctggagtatgtcgccgatgtggccccggacgccggtctgcgtcccaaagatcccgtgctgctggcgcgtatgcgcgaagtgatgttctacctcgcctccaccatgcatgtcaaccacgcccacaagctccggggctcgcggtgggcgaccgagcgttcgtcctggaaagacatgcaaaagatggtcccgcagaccatggcggcctcgtgcgactacatctgccagagcggcctgcgtggtccgctcgtcgtgggtgataccctgtcgctggccgactgctatctgtacgtggtgtgtagctggctcgaaggcgacggggtcaacgtggcggactacccgaagatccagaagttcatggcgagcatggaccagcgcgagagcgtgcgtgccgtcaccgccaaaggtatgctc

SEQ ID NO: 563 - protein, 278 aa, Artificial Sequence
  Description of Artificial Sequence: Synthetic polypeptide
MGYGAAMTFTLYHHGSSVCAAKVRFAMAEKGMDWEGVYIDILAGEQFEPEYQKINPKSVVPTLVHNDLVIPDSTVIVEYLDQIAPETSVHPTDPYLRAQVRYWTKAVDEDLHPACGAVTFLCSHRHTVLRKLGKEGTERFLASTPEFSVTSDWKSFKDAIIRHGFDAPGAVEKVKLYDSYLYKMEKALEGNDWLVGNTFTIADIALTPYVNRLAMMSMRGMWEGGRLPNVERWFNAIEAREHFKPCFIDWVPEDLTNDLRENGIKSWPEVAAILEIEI

SEQ ID NO: 564 - DNA, 834 bp, Artificial Sequence
  Description of Artificial Sequence: Synthetic polynucleotide
atgggctacggcgcggccatgacgttcaccctgtatcatcatggcagcagcgtctgtgccgccaaggtgcgcttcgccatggccgagaagggcatggactgggaaggcgtctacatcgacatcctggcgggcgaacaattcgagcccgagtaccaaaagatcaacccgaagtcggtcgtgcccaccctggtccacaacgacctggtgatcccggacagcacggtcatcgtggaatacctggaccagatcgcccccgaaacctccgtccatccgaccgacccgtatctccgcgcccaggtgcgttactggaccaaggcggtggacgaggacctgcatccggcgtgtggcgcggtgacgttcctgtgcagccaccggcacaccgtgctgcgcaagctgggcaaggagggcaccgagcggttcctggcgtccacgcccgagttctcggtgacctccgactggaagagcttcaaggacgcgatcatccgtcatggcttcgacgcgccgggtgccgtggaaaaggtgaagctgtacgactcctacctgtacaagatggagaaggccctcgaaggcaacgactggctcgtcggcaacaccttcacgatcgccgacatcgccctgaccccgtacgtgaaccgtctcgccatgatgtcgatgcgcggtatgtgggagggtggccgtctgcccaacgtggaacgctggttcaacgccatcgaggcccgcgaacacttcaagccgtgcttcatcgactgggtcccggaggacctcaccaatgacctgcgggagaacggcatcaagagctggcccgaagtggccgccatcctcgaaatcgaaatc

SEQ ID NO: 565 - protein, 204 aa, Artificial Sequence
  Description of Artificial Sequence: Synthetic polypeptide
MQLYYAPNTISVAVAIALEEAGIEYETVEIDFAAKEQTGAAYGQINPKNRVPALAVEGGILTETGALLEYIADLAPDAGLRPQDPVRLARMREVMFYLASTMHVNHAHKLRGARWAKERTSWKDMQKMVPQTMSASCEYLSQFGLRGPFVLGDEISLADCYLYVVCTWLEGDGVNVADFPKIQNFMTAMEQRGSVRAVHAKGML

SEQ ID NO: 566 - DNA, 612 bp, Artificial Sequence
  Description of Artificial Sequence: Synthetic polynucleotide
atgcagctctattacgcgccgaacaccatctccgtcgcggtcgccatcgccctggaagaggcgggcatcgaatacgagacggtggagatcgatttcgccgccaaggagcagaccggcgccgcctacggccagatcaaccccaagaaccgggtcccggccctggcggtggagggcggcatcctcaccgagaccggtgccctgctggaatatatcgccgatctcgccccggatgccggcctgcgtccccaggacccggtccgtctcgcgcgtatgcgcgaagtcatgttctacctcgcgagcaccatgcatgtcaaccatgcccacaaactccgtggcgcccgctgggccaaggagcggacctcgtggaaagacatgcagaagatggtgccgcagacgatgtcggcgtcctgcgaatacctgtcgcagttcggtctgcgcggtcccttcgtcctcggcgacgagatcagcctggccgactgttacctgtacgtcgtgtgcacctggctggaaggcgacggggtgaacgtggcggacttccccaagatccagaacttcatgaccgcgatggagcaacggggcagcgtccgggccgtccacgccaagggcatgctg

SEQ ID NO: 567 - protein, 261 aa, Artificial Sequence
  Description of Artificial Sequence: Synthetic polypeptide
MKAIDPKDLRGLHLFYNLYSNCAQRVMLLLAEKGIEAEMHFVDLMRSEQLTPEYHAINPDAAVPALVHDGVAMNESINILRYLEELNPDPSFTPSDPTQKAQMEALLDSAEASHMSMVVNYVYSCGYGRLPTPRDAQFYKDHVPHRAEFHADRLAGRTANDPEGAKRIVFEQFSELERLLERQEWLVGDQYSLADIAWFPNTIILRQLGYSFNSLPRVNDWIARIEAREAYKTGIQSRFMKVPNWVIRLATRLLRQIGGRR

SEQ ID NO: 568 - DNA, 783 bp, Artificial Sequence
  Description of Artificial Sequence: Synthetic polynucleotide
atgaaggccatcgacccgaaggacctgcgcggcctgcacctgttctacaacctgtatagcaactgcgcgcagcgtgtgatgctgctgctcgccgagaaaggcatcgaggcggagatgcatttcgtcgacctgatgcggagcgagcagctgacgccggaataccatgcgatcaacccggacgccgccgtgccggccctggtccatgatggggtggccatgaacgaatccatcaacatcctgcggtacctggaagagctcaatcccgacccgtcgttcaccccgagcgacccgacccagaaagcccagatggaagcgctcctggactcggccgaggcgtcccacatgagcatggtggtgaactacgtctacagctgtggctacggccggctgccgaccccgcgcgatgcgcagttctacaaagaccacgtgccgcatcgcgccgagttccacgccgatcgcctcgccggtcgtaccgccaatgatccggagggtgccaagcggatcgtgttcgaacaattctccgagctggagcggctcctggaacgccaggagtggctggtcggcgatcagtacagcctggccgacatcgcctggttcccgaacacgatcatcctccgccagctgggttacagcttcaatagcctcccgcgggtcaacgactggatcgcccgtatcgaagcgcgtgaggcgtataagaccggcatccagagccgcttcatgaaggtccccaactgggtcatccgcctggccacccgcctgctgcgccagatcggcggtcgtcgc

SEQ ID NO: 569 - protein, 204 aa, Artificial Sequence
  Description of Artificial Sequence: Synthetic polypeptide
MQLYFAPNTISVAVAIALEEAGQDYEPIHIDFASKEQTGAAYAQINPKGRVPALVVDGGILTETGALLEYIADISPDAALRPQDPVLLARMREVMFYLASTMHVNHAHKMRGARWASERSSWKDMQKMVPQTMSASCDYISQFGLRGPFVLGDEISLADCYLYVVCTWLEGDGVTLSDFPKIQEFMAAMEARDSVRAVTAKGML

SEQ ID NO: 570 - DNA, 612 bp, Artificial Sequence
  Description of Artificial Sequence: Synthetic polynucleotide
atgcagctctacttcgcgcccaacaccatctcggtcgccgtggccatcgcgctggaagaggccggccaggactacgagcccatccacatcgacttcgcgagcaaggaacagaccggtgcggcctatgcgcagatcaatccgaaagggcgcgtgcccgcgctggtcgtggatggcggcatcctgaccgaaacgggggccctgctggaatacatcgccgacatctcgcccgatgccgccctgcgtccgcaagatccggtcctcctggcccgtatgcgcgaggtcatgttctacctcgcctcgaccatgcacgtcaaccatgcccataaaatgcggggcgcgcggtgggcctcggaacgttcgtcgtggaaggacatgcagaagatggtcccgcagacgatgtccgcctcctgcgactacatctcgcaattcggcctgcgtggcccgttcgtgctcggcgatgagatctccctggcggactgctacctgtacgtggtgtgcacgtggctggaaggcgatggcgtgacgctgagcgacttccccaaaatccaggagttcatggcggccatggaggcccgcgactccgtgcgtgccgtgacggcgaagggtatgctc

SEQ ID NO: 571 - protein, 268 aa, Artificial Sequence
  Description of Artificial Sequence: Synthetic polypeptide
MLELYHHGSSVCAAKVRFALAEKGIEVDEGHYIDILAGEQFTDEYRKINPKAVVPSLVHDDKVLNESTVICEYIDDEFAGPELVPGDAYGRAQMRMWTKAVDEQLHPACGELTFVCCHRHIVLRLPPEKLDEFLASTPDQSVTSKWKARKQEIVREGFEAPGIEDTIRLYYNYLVKMNEALADHEWLAGDTFSLADIGLAPYVNRLDMLGMSGMWEGRLTEVERWFDAIKARPRFKEVFLDWCPEKLTEDLKTFGEQSWPEVKKIIGI

SEQ ID NO: 572 - DNA, 804 bp, Artificial Sequence
  Description of Artificial Sequence: Synthetic polynucleotide
atgctggagctgtaccaccatgggagcagcgtctgcgccgccaaagtgcgcttcgcgctcgcggagaagggcatcgaggtggatgagggccactacatcgacatcctcgcgggcgaacaattcaccgacgagtaccgcaagatcaacccgaaggccgtggtccccagcctggtccatgacgacaaggtgctgaacgagagcaccgtgatctgtgagtacatcgatgacgagttcgcgggccccgagctcgtgccgggggatgcctatggccgcgcgcaaatgcgcatgtggaccaaggccgtcgacgaacagctgcatccggcctgcggcgagctcaccttcgtctgctgccaccgccatatcgtcctccgtctgccgcccgaaaagctggacgagttcctcgcgtccacgccggaccagagcgtcacctcgaagtggaaggcgcgcaagcaagagatcgtccgggaaggcttcgaggcgcccggcatcgaggacaccatccggctgtactacaactatctggtcaagatgaacgaagcgctcgccgatcacgaatggctcgcgggggacacgttcagcctggccgatatcgggctcgccccgtatgtcaaccgtctcgacatgctgggcatgtcgggtatgtgggagggccgtctcacggaagtggaacgctggttcgatgccatcaaagcccggccgcgtttcaaggaggtcttcctggactggtgcccggagaagctcaccgaagacctgaagaccttcggcgagcagagctggccggaagtcaagaagatcatcggcatc

SEQ ID NO: 573 - protein, 256 aa, Artificial Sequence
  Description of Artificial Sequence: Synthetic polypeptide
MSVCAQKTRMVLAHKGLEWESKHLDLRAGEQFSAEFRKINPKGLVPALVHDDKVVLESNAIVQYLDEVFAAPPLLPVDAVERAEARGWLIRLDAGLHEHIAVVSFCVAFRHQILQRHATPESLQEFFAQIRDPSRRAVMEDIVTNGLMSSRLLLAVFVYDKLLKDMTSCLAASGCLVGRELSLADFAMLPYIERLEQLQLSQWWESYPELGRWLARLRATPAYELGVAQWSNPAYLQLMKESGSDAWPKIQALLSD

SEQ ID NO: 574 - DNA, 768 bp, Artificial Sequence
  Description of Artificial Sequence: Synthetic polynucleotide
atgagcgtctgtgcccagaagacccgcatggtgctggcccacaagggcctggaatgggagagcaagcacctggacctgcgcgcgggcgagcagttctccgccgagttccgcaagatcaatccgaaagggctggtcccggcgctggtgcatgacgataaggtggtcctggagagcaacgccatcgtgcagtacctggacgaggtcttcgccgccccgcccctgctccccgtggacgccgtcgagcgtgcggaagcgcgcggctggctgatccgcctggatgcgggcctgcacgagcacatcgccgtcgtgagcttctgtgtcgccttccgccatcagatcctgcaacggcacgccacgcccgagagcctgcaggagttcttcgcccagatccgcgaccccagccgccgcgcggtgatggaggacatcgtgaccaacggcctgatgagctcgcggctgctgctggccgtcttcgtctacgacaagctgctgaaggacatgacgagctgcctggccgccagcggctgcctggtcggtcgtgagctctccctggccgacttcgcgatgctgccgtatatcgaacggctggagcagctgcagctgagccagtggtgggaatcgtacccggagctggggcgttggctggcccgcctgcgtgcgaccccggcgtatgaactgggtgtggcgcagtggtcgaaccccgcgtatctgcagctcatgaaagagtcgggcagcgacgcctggccgaagatccaagccctgctgtccgac

SEQ ID NO: 575 - protein, 204 aa, Artificial Sequence
  Description of Artificial Sequence: Synthetic polypeptide
MQLYYAPHTISIAVAIALEEAGLAYEAIKIDFAEKQQTTKAYHQINPKGRVPALVVEGGILTETGALLEYIADLAPDAGLRPTDPVRVARMREVMFYLASTMHVNHAHKLRGARWASNPASFKDMTRKVPETMAASCEYICNHGLHGPFVLGDSLSLADCYLYVISTWLEGDGVKLAGFPKLQAFMEAMEARDSVKAVRAKDML

SEQ ID NO: 576 - DNA, 612 bp, Artificial Sequence
  Description of Artificial Sequence: Synthetic polynucleotide
atgcagctgtactacgcgccccataccatctcgatcgccgtggccatcgccctggaggaagccgggctcgcctatgaagccatcaagatcgacttcgcggaaaagcagcagaccaccaaggcctaccatcagatcaaccccaaaggccgcgtgccggccctcgtggtcgagggtggtatcctgacggaaacgggtgccctcctggaatatatcgccgacctggcgccggatgccggcctgcgtcccaccgacccggtccgcgtggcccgtatgcgggaagtcatgttctacctggcctccaccatgcacgtcaatcatgcgcacaaactgcgtggtgcccgctgggcgtcgaatcccgcctccttcaaagatatgacgcgcaaggtgccggagacgatggccgcgagctgcgagtatatctgcaaccatggcctgcacggtccgttcgtcctgggcgattcgctgtcgctggcggactgctacctgtacgtcatctccacctggctggagggtgatggcgtcaagctggccggcttcccgaagctgcaggccttcatggaggccatggaagcgcgcgacagcgtcaaggccgtccgcgccaaggatatgctg

SEQ ID NO: 577 - protein, 265 aa, Artificial Sequence
  Description of Artificial Sequence: Synthetic polypeptide
MAEPQELTIYHIPGCPFSERVEIMLELKGLRMKDVEIDISKPRPDWLLAKTGGTTALPLLDVENGESLKESMVILRYLEQRYPEPAVAHPDPFCHAVEGMLAELAGPFSGAGYRMILNREIGKREEMRAAVDAEFGKVDAFLKRYATGSDFLFDDRFGWAEVAFTPMFKRLWFLDYYEDYEVPANFDRVLRWRAACTAHPAAQYRSKEELLKLYYDYTQGGGNGRIPEGRSISSFSPDVDWRTRPMPPRDKWGHAATDAELGLTR

SEQ ID NO: 578 - DNA, 795 bp, Artificial Sequence
  Description of Artificial Sequence: Synthetic polynucleotide
atggccgagccgcaagagctcacgatctaccacatccccggctgtccgttctcggaacgcgtggagatcatgctggagctgaaaggtcttcggatgaaggacgtggaaatcgacatctccaaaccgcgccccgactggctgctcgccaagaccggtggcacgaccgcgctcccgctgcttgacgtggagaacggcgagtcgctgaaagagtccatggtcatcctgcgttatttggagcagcgctatccggaaccagccgtcgcacaccctgaccccttctgtcacgccgtggaagggatgctggcggagctcgccggtccattcagcggcgcgggctaccgcatgatactgaatcgcgagatcggcaagcgcgaagaaatgcgcgcggctgtcgacgccgagttcggaaaggtcgacgcatttctgaagaggtacgccaccggcagcgacttcttgtttgacgaccgctttggctgggccgaagtagcattcacccccatgttcaagcggctttggttcctggactactacgaggattacgaggtacccgccaatttcgaccgcgtactccgctggcgcgcagcctgtacggcccatccggccgcgcaatatcgcagcaaggaggaactgctgaagctctactacgactacacacagggagggggcaacggccgcatccccgagggtcggtccatcagctctttctctccggatgtcgactggcgaacccgacccatgcctccaagggacaagtggggccatgcggcgacagatgccgagttgggcctgacccga

SEQ ID NO: 579 - protein, 277 aa, Artificial Sequence
  Description of Artificial Sequence: Synthetic polypeptide
MAWHEEPPPGALRMYHIPGCPFSERVEILLDLKGLSGIMDDHEVDISKPRPDWLLSKTRGTTSLPALELENGETLKESMVILRYFEERFPERPVAQRDPFEHAVEAMLCATDGQFTGAGYRMILNRDRAKRDDCKAEVDAQYARLDDFLRHYSPDGDYLFASFGWAEVVFAPMFKRLWFLEYYEGYEVPQHLARVLRWREACTEHPAVANRHSHRELMTLYYDYSQGGGNGRLPQGRHISSFTLDPAWEKRPMPPRDKWGTPATDRELGLVTATVGA

SEQ ID NO: 580 - DNA, 831 bp, Artificial Sequence
  Description of Artificial Sequence: Synthetic polynucleotide
atggcctggcacgaggaacctccgccgggagcgcttcgaatgtatcatatccccgggtgcccgttctcagagcgggtggagatcctgctggacctgaaaggcctgagcggtatcatggacgaccacgaggtggacatctcgaagcctcgccccgactggctgctctcgaagacaaggggcaccacctcgttgcccgccttggaattggaaaacggcgagaccctgaaggagtccatggtcatcctcaggtacttcgaagagcgcttcccggaacggccggttgcccagcgcgacccgttcgaacacgcggtggaggcgatgctttgtgccaccgatggccaattcaccggcgctggttaccggatgattctgaaccgcgaccgagcgaaaagagacgactgtaaggctgaagttgacgcccagtacgcccgcctggacgacttcctacgccactactcgccggacggggattacctgttcgccagcttcggctgggcggaggtagtattcgcccccatgttcaagcgcctctggttcctggagtactacgagggctacgaggtgccgcagcacctggcgcgggtcctcagatggcgcgaagcgtgtacagaacacccggcggtcgcgaaccgccactcccaccgcgagctcatgaccctctactacgattacagccagggcggcggcaatggccgcctgccccaaggccggcatatcagctcgttcaccctcgaccctgcctgggaaaagcgcccaatgccgccgcgcgacaagtggggcacacccgccaccgaccgagagctgggcctcgtcaccgcgacggtgggagcc

SEQ ID NO: 581 - protein, 263 aa, Artificial Sequence
  Description of Artificial Sequence: Synthetic polypeptide
MTRPTVYHIPVCPFCQRVEILLSLKGRREDVDFRMIDITAPRPDWLLQKTRGTTALPVLETADGRVIKESLVILRYFEDIYREPQIAQTDPYRRAVENMLTTMDRDFVAAGYGWLMNQDPKQRDALRENMLKQYAQLDDFLLEHGAPGPFLFETFGWAETVFTPFFQRFWFLEYYEDFELPTASRYARVREWIDACVAHPAAQQTTREEVIKLYYDYACGAGNGALLPGRSRSSFALEPDWRARPWPPRSKYRQPAGDTELGL

SEQ ID NO: 582 - DNA, 789 bp, Artificial Sequence
  Description of Artificial Sequence: Synthetic polynucleotide
atgacccgcccgaccgtctaccatatcccggtgtgcccgttctgccagcgcgtcgagatccttctgagcttgaagggtcgccgggaagacgtcgacttccgcatgatcgacatcacggcgccgcgcccggattggctcctccagaagacgcgtggtaccactgccctgccggtgttggagaccgcggacggcagggtcatcaaggagagcctggtcatcctccgctatttcgaggacatctaccgggaaccgcagatcgcacagaccgatccctaccggcgcgcggtcgagaacatgctcacaacgatggatcgcgatttcgtggcagcaggctacggctggctgatgaatcaagacccgaagcagcgtgacgccctgcgcgagaacatgctcaagcagtacgcgcaactggacgatttcctgctggaacatggcgcgcccggtccgtttctgttcgaaaccttcgggtgggccgagacagtgttcactccctttttccagcgcttctggttcctggagtattacgaggactttgagctgccgacagcatcccggtacgcccgggtccgggaatggatcgacgcatgtgttgctcacccggcggcgcagcagaccacccgggaagaggtcatcaagctctactacgactacgcatgcggcgcgggaaatggcgctttgctcccaggccgcagtcggtcaagtttcgccctggaacccgattggagagcgcgcccgtggccgccgcgctcgaaataccgccagcccgccggggacacggaactgggtctc

SEQ ID NO: 583 - protein, 280 aa, Artificial Sequence
  Description of Artificial Sequence: Synthetic polypeptide
MIRFRQHDPGAKTLSGKFIIHHIPVCPFSQRIEILLALRSLSDAVEFRVVDITRPRDPELLAKTRGTTALPVLETPDGRIIKESLVILRYLDEVLPGAPLRRIDPAEHAIESMLIAKEGAFVTAGYLYVMNQDRSQREAHLDRLLGLYRGLDDFLVEHNPKGTWLFDGFGLAEAVYTPLFKRFWFLDYYEDFALPDDPAYDRVRVWRAACIAHPATDQVSEEEIVKLYYDYALGAGNGALVDGRTVSSFAFEPDWRSRPWPPRDKYDGTASDAALGLLSV

SEQ ID NO: 584 - DNA, 840 bp, Artificial Sequence
  Description of Artificial Sequence: Synthetic polynucleotide
atgatcaggttccgccagcatgatcctggcgccaagacgctgtcgggaaagttcatcatccatcacatccccgtgtgcccgttctcgcagcgtatcgaaatcctgctggccttgcgctcgctgagtgacgcggtcgaatttcgggtcgtggacattacccgtcctcgcgacccggaactcctggctaagacgcgcggcacgacggccctgcctgtcctcgaaacaccggacgggcgcatcatcaaagagtccctggtgattctccgctaccttgacgaggtgctgccgggcgcccccttgcgccgaatcgaccctgcagaacacgccatcgagagcatgctgatcgcgaaggaaggtgctttcgtaacagccggctatctctacgtgatgaaccaagatcgtagccagcgcgaggcccaccttgaccgcctgcttggcttgtaccggggcctggacgacttcctcgtggaacataacccgaaggggacgtggctgttcgacggattcgggctggcggaggccgtctacaccccgctgttcaagcggttctggttcctggattattatgaggacttcgccttgcctgacgaccccgcgtatgaccgagtccgcgtctggcgtgctgcgtgtatcgcccatccagccacggaccaggtgagcgaggaggagatcgtaaagttgtactacgactacgcgttgggagctggcaacggagcgctcgtggacggccgcactgtatcgagtttcgccttcgagcctgactggcgaagtcggccgtggccgcctcgggataagtatgacggcaccgctagcgatgcggccttgggccttctgtccgta

SEQ ID NO: 585 - protein, 244 aa, Artificial Sequence
  Description of Artificial Sequence: Synthetic polypeptide
MALRGQQDAVEFRVVDITKPRDPELLAKTRGTTALPVLETRDGRILKESLVILRYLDEALEGPMLRRSDPLEHAIESMLIAREGPFTMAGYLFVMNQDRARRGEHLDNLLALYRDINDFLTDRNPKGTYLFEDFGLAEAVFAPMFKRFWFLDYYEDFELPRGTDYERVRIWRDACMAHPSTHQVTEEQIVKLYYDYALGAGNGALPEGRNVSSFVFEPSWQSRPMPPKDKYAGSATDRDLGLVA

SEQ ID NO: 586 - DNA, 732 bp, Artificial Sequence
  Description of Artificial Sequence: Synthetic polynucleotide
atggcgctccgcggccaacaagacgcggtggagttccgagtcgtggacatcactaagcccagagacccggagctgctcgccaaaacccggggtacaactgcactccccgtgctggagacccgcgacggccgaatactcaaggaatctctcgtgatcctgcgttacctggacgaggccttggagggcccgatgctacgccgctccgaccccctcgaacacgccatcgaaagtatgctgattgcgcgcgagggtccttttacgatggcgggctacctcttcgtcatgaaccaggaccgcgctcgccgtggcgagcatctggacaatctgctggccctctatcgcgacatcaacgacttcctaaccgatcgcaatccgaagggcacctacctcttcgaagacttcggcctggcggaagctgtcttcgcaccgatgttcaagcggttctggttcctggactactacgaggatttcgagctgccccgcggaacggattacgagcgcgtgcgcatttggcgggacgcgtgtatggctcatcccagtacccatcaggtgacggaagagcagattgtcaagctgtattacgactatgccctgggcgcaggcaacggagcactgccggagggccgtaacgtctcttccttcgtttttgaaccctcttggcaatcgagaccaatgcccccgaaggacaagtacgccggcagtgcgaccgatcgggatctcggcctggtggca

SEQ ID NO: 587 - protein, 224 aa, Artificial Sequence
  Description of Artificial Sequence: Synthetic polypeptide
MTEQNLTLVSHPLCPFVQRAAIVLLEKGVAFDRVNVDLSAKPDWFLALSPTGKVPVLKVRQPNGEEAILFESVVICEYLNEKQGGAAMYPDDALLRARHRAWIEFATQTFAEGWQFLHAKDMATADAKRAAFRDRLSKIEAELGDGPYFAGANFGLVDAVYAPLFRYFGIIDPEVADPIFAGLPRVTAWRAALAERSSVKNAVIDTYPDLFRDHLRQQGAMIAA

SEQ ID NO: 588 - DNA, 672 bp, Artificial Sequence
  Description of Artificial Sequence: Synthetic polynucleotide
atgacggaacagaacctgaccctggtgtcgcacccgctgtgtcccttcgtgcaacgcgcggccatcgtcctgctcgaaaagggcgtggcgttcgaccgtgtgaacgtcgacctgtcggccaagcccgactggttcctggcgctgtcgccgacgggcaaggtccccgtcctcaaagtgcgccaacccaacggcgaggaagcgatcctcttcgagtccgtggtcatctgtgagtacctcaacgagaagcagggcggggcggccatgtaccccgacgacgcgctgctccgcgcgcgtcatcgtgcctggatcgagttcgccacgcagacgttcgccgaggggtggcagttcctccacgcgaaggatatggccaccgcggacgccaagcgcgcggccttccgtgaccggctgagcaaaatcgaggccgaactcggcgacggcccctacttcgcgggcgccaacttcggcctggtcgatgccgtctatgccccgctgttccgctacttcgggatcatcgacccggaagtggccgaccccatcttcgcgggcctgccgcgtgtcaccgcctggcgtgccgccctcgccgaacgctcctccgtcaagaacgccgtcatcgatacctatccggacctgttccgcgaccacctgcgtcagcaaggtgcgatgatcgccgcc

SEQ ID NO: 589 - protein, 241 aa, Artificial Sequence
  Description of Artificial Sequence: Synthetic polypeptide
MTGSEKSLAKGSPAPGPVSEETIRVYSMRFCPYAQRARLVLAAKGIKHEVININLKNKPDWFIEKSPFGLVPSLETSSGQVIYESPIVCDYLDEVYPGKKLTPADPFQKAQQKMIVEHFSKISTLFYKILLAKKNNEDVSGVKAEVQEKLVKLDEILAKQNGLFFGGSDVSMVDYMIWPWFERLIIFDSKDCLNKTPHIDKWYQQMLQDPAVKATYIEPDLLLGFFKLYSQNDVEACDYGL

SEQ ID NO: 590 - DNA, 723 bp, Artificial Sequence
  Description of Artificial Sequence: Synthetic polynucleotide
atgaccggttccgagaagtcgctggccaagggcagccccgcgccgggtccggtgtcggaggaaaccatccgcgtgtatagcatgcgtttctgtccgtacgcccagcgcgcccgtctcgtgctggcggccaagggcatcaagcatgaggtcatcaacatcaacctgaagaacaagccggactggttcatcgagaagtccccgttcgggctggtgccgtccctggaaaccagcagcggccaggtcatctatgaatccccgatcgtctgtgactacctcgacgaagtctacccgggcaagaagctcacccccgccgatcccttccaaaaggcgcagcagaagatgatcgtcgaacacttctccaagatctccaccctgttctacaagatcctgctcgccaagaagaacaacgaggatgtcagcggggtgaaggccgaagtccaggaaaagctcgtgaagctggacgagatcctggccaagcagaatggcctgttcttcggtggctccgatgtctcgatggtggactacatgatctggccctggttcgagcgcctcatcatcttcgactcgaaggactgtctcaacaagaccccgcacatcgacaaatggtaccagcagatgctgcaagacccggcggtcaaggccacctacatcgagcccgacctgctcctgggcttcttcaagctgtacagccagaacgacgtcgaggcgtgcgattacggcctg

SEQ ID NO: 591 - protein, 241 aa, Artificial Sequence
  Description of Artificial Sequence: Synthetic polypeptide
MTGSEKSLAKGSPAPGPVSEETIRVYSMRFCPYAQRARLVLAAKGIKHEVININLKNKPDWFIEKSPFGLVPSLETSSGQVIYESPIVCDYLDEVYPGKKLTPVDPFQKAQQKMIVEHFSKISTLFYKILLAKKNNEDVSGVKAEVQEKLVKLDEILAKQNGLFFGGSDVSMVDYMIWPWFERLIIFDSKDCLNKTPHIDKWYQQMLQDPAVKATYIEPDLLLGFFKLYSQNDVEACDYGL

SEQ ID NO: 592 - DNA, 723 bp, Artificial Sequence
  Description of Artificial Sequence: Synthetic polynucleotide
atgacgggctccgaaaagtcgctggccaagggcagcccggcccccggtcccgtcagcgaagaaacgatccgggtgtattccatgcgcttctgcccgtatgcccagcgcgcccgtctcgtgctggccgcgaagggcatcaagcacgaagtcatcaacatcaacctgaagaacaagccggactggttcatcgagaagagcccgttcggcctcgtgccctcgctggagacgtccagcggccaggtgatctacgagtccccgatcgtctgcgactacctggacgaggtgtatccgggcaagaagctgacccccgtggacccgttccagaaagcccagcagaagatgatcgtcgagcatttctcgaagatctccaccctgttctacaagatcctcctggcgaagaagaacaacgaggacgtgtccggggtcaaggccgaagtgcaggagaagctggtcaagctggacgagatcctcgccaagcagaatggcctgttcttcgggggctccgacgtcagcatggtggattacatgatctggccgtggttcgagcggctgatcatcttcgactcgaaggactgcctgaacaagaccccgcacatcgacaagtggtaccagcagatgctgcaggaccccgccgtgaaagcgacgtacatcgagccggacctgctcctgggcttcttcaagctctattcccagaacgacgtcgaggcctgcgactacggcctg

SEQ ID NO: 593 - protein, 241 aa, Artificial Sequence
  Description of Artificial Sequence: Synthetic polypeptide
MSSKHLTIGSVAPPIVPGKIRLYSMRFCPYAQRIHLVLDAKHIPHDVVYVNLTHKPDWLLEKSPLGKVPCIELEGGEILYESLVIAEYLDDTYPQNKLYPNDPLARAKDKLLIGRFNSVINTMCKLFINTSIDQDIFDEALSELELFERELASRGTPFFHGNSPGMLDFMIWPWWERSNTIKMLRGDQFTIPHDRFKRLLEWRSAMKENPAIRSNYLDTEIHAKYMQSRRAGTPQYDLITD

SEQ ID NO: 594 - DNA, 723 bp, Artificial Sequence
  Description of Artificial Sequence: Synthetic polynucleotide
atgtcgagcaagcacctgacgatcggctcggtggcgccgcccatcgtccccggtaagatccgtctgtacagcatgcgcttctgcccctacgcgcaacgcatccacctggtcctcgatgccaagcacatcccgcacgacgtggtctacgtgaacctgacccataaaccggactggctgctcgaaaagagccccctgggcaaggtcccgtgtatcgagctggagggtggcgagatcctgtacgaatccctggtgatcgccgaatatctggacgacacctacccgcagaataagctgtacccgaacgacccgctcgcccgcgcgaaggacaagctcctgatcggccgcttcaactcggtgatcaacacgatgtgcaagctgttcatcaacacctcgatcgaccaggacatcttcgacgaagccctcagcgaactcgaactgttcgagcgtgaactcgcgagccgtggcaccccgttcttccacggcaacagcccgggtatgctcgatttcatgatctggccctggtgggaacgcagcaacaccatcaagatgctgcgtggtgaccaattcaccatcccgcatgaccggttcaagcggctcctcgaatggcggagcgccatgaaggagaacccggcgatccgctcgaattacctcgacaccgaaatccacgcgaagtatatgcaatcccgccgcgccggcacgccgcagtacgacctcatcacggac

SEQ ID NO: 595 - protein, 224 aa, Artificial Sequence
  Description of Artificial Sequence: Synthetic polypeptide
MAFCPFSHRVRLMLTAKQIEHHKIYVDLIEKPEWYKDFSPLGKVPALQLTGVKDQPTLVESLIIAEYLDQQYPQTRLFPTDPLQKALDKILIERFAPVVSAIYPVLTCNPNAPKDAIQNFENALDVFEVELGKRGTPYFTGQHIGIVDYMIWPWFERFPSMKINTEQKYELDAKRFEKLLKWRDLMTQDEVVQKTALDVQLHAEFQKSKTLGNPQYDLAFKGTP

SEQ ID NO: 596 - DNA, 672 bp, Artificial Sequence
  Description of Artificial Sequence: Synthetic polynucleotide
atggcgttctgcccgttcagccaccgtgtccgtctcatgctcaccgccaagcagatcgagcatcacaagatctacgtcgacctgatcgagaaacccgaatggtataaggacttctcgccgctgggtaaggtcccggccctgcaactcaccggtgtcaaggaccagcccaccctcgtggaaagcctcatcatcgccgaatacctggaccaacagtatccgcagacccggctcttccccaccgatccgctgcagaaggcgctggacaagatcctgatcgaacgcttcgcgccggtggtctcggccatctatccggtcctgacctgtaatccgaacgccccgaaggacgccatccagaacttcgagaacgccctggacgtgttcgaggtggaactgggcaagcgggggaccccgtatttcacgggccagcacatcggcatcgtggactacatgatctggccctggttcgaacgcttcccgtccatgaagatcaacacggaacagaagtacgagctggacgccaagcggttcgagaagctgctgaagtggcgtgatctgatgacccaggatgaagtggtgcagaagaccgcgctggatgtgcagctgcacgccgagttccagaaatccaagaccctggggaacccgcaatacgacctggccttcaagggcacgccg

SEQ ID NO: 597 - protein, 240 aa, Artificial Sequence
  Description of Artificial Sequence: Synthetic polypeptide
MAASQKCLGKGSPAPGPVPKDHIRLYSMRFCPFAQRTRLVLNAKGIKYDTININLKNKPDWFLEKNPLGLVPVLETQSGQVIYESPITCEYLDEVYPEKKLLPFDPFERAQQRMLLELFSKVTPYFYKIPVNRTKGEDVSALETELKDKLSQFNEILLKKKSKFFGGDSITMIDYMMWPWFERLETMNLKHCLDGTPELKKWTERMMEDPTVKATMFSTETYMVFYKSYMEGNPNYDYGL

SEQ ID NO: 598 - DNA, 720 bp, Artificial Sequence
  Description of Artificial Sequence: Synthetic polynucleotide
atggcggcgagccaaaagtgcctgggcaaggggtccccggcccccggtcccgtccccaaagatcacatccgcctgtacagcatgcgcttctgccccttcgcccagcgtacccggctcgtgctgaacgcgaagggcatcaagtatgacaccatcaacatcaacctgaagaacaagccggactggttcctggagaagaatcccctgggcctggtccccgtcctggagacccaaagcggccaggtgatctacgagtcccccatcacgtgcgaatacctggacgaagtgtacccggagaagaaactcctgccgttcgatccgttcgagcgcgcccaacagcggatgctgctggagctgttctcgaaagtcacgccctatttctacaagatccccgtgaaccggaccaagggcgaagacgtcagcgccctggaaaccgaactgaaggacaagctgtcgcagttcaacgagatcctgctgaagaagaagtcgaagttcttcgggggcgacagcatcaccatgatcgactacatgatgtggccctggttcgagcggctggagacgatgaacctgaagcattgtctggatgggacccccgaactgaagaagtggacggaacgcatgatggaagaccccaccgtcaaggcgaccatgttctccaccgagacctacatggtcttctacaagtcgtacatggaaggcaatccgaactatgactacggtctc

SEQ ID NO: 599 - protein, 249 aa, Artificial Sequence
  Description of Artificial Sequence: Synthetic polypeptide
MGDSQPPLKDACLRLYSMRFCPYAQRVHLVLDSKNIKYEVVNINLSDKPDWFYDKSPEGKVPALEFPNGETLYESLIIADYLDEKYPERPLYPKDPLAKAKDKLLMEKFNRVIRGIYKMLLHEGFSPEIMDDVKAGLDLFEKEMCIRKTKFLGGEYRKTKKKILFGSKPGMLDFMIWPWCERADILKIVGGDLYKLPKDRFPKILEWRVNMIADEGVRVSYLDPEIHAKYFMSRQAGTPDYDLLHKMKH

SEQ ID NO: 600 - DNA, 747 bp, Artificial Sequence
  Description of Artificial Sequence: Synthetic polynucleotide
atgggggactcgcaaccgccgctcaaggacgcgtgtctgcgtctgtactccatgcgcttctgcccgtatgcccagcgggtccacctggtgctggacagcaagaacatcaagtacgaggtcgtgaacatcaatctgagcgacaagcccgactggttctacgacaagagccccgaaggcaaggtcccggcgctggagttccccaacggggagaccctgtacgaatccctgatcatcgccgactacctggatgaaaagtaccccgagcgcccgctgtatcccaaggacccgctcgcgaaggccaaggataagctgctgatggagaagttcaaccgcgtgatccgcggcatctacaagatgctgctgcacgagggcttcagcccggaaatcatggatgacgtgaaggccgggctcgacctgttcgagaaggagatgtgcatccgcaagaccaagttcctcgggggcgagtaccggaagacgaagaagaagatcctgttcggctccaagccgggtatgctggacttcatgatctggccctggtgcgagcgcgccgacatcctgaagatcgtgggtggcgacctctataagctgcccaaggaccgtttccccaagatcctggagtggcgcgtcaacatgatcgcggacgagggcgtgcgcgtcagctacctggacccggagatccatgccaagtatttcatgtcccgtcaggcgggcaccccggattatgatctgctccataagatgaagcac

SEQ ID NO: 601 - protein, 254 aa, Artificial Sequence
  Description of Artificial Sequence: Synthetic polypeptide
MSAGKHLSKGSTIPELPDDGMLRLYSMRFCPYSHRVHLVLDAKKIPYHAIFIDVSDKPEWLTDLNPLGKVPALQLVKETGQPALVESLIISEYLDEKYPENRLFPKDPLKKAQDKILIERFNPVIGAMYKMFVSPEVVPGAITNLSTGLDIFEDELQKRGSAYFGGDKPGMLDYMIWPWCERSEMLKCLLGNKYEMDKERFNNLLKWRDLMIEDEAVKCFYLDGETHAKFMKTRREGNPNYNMLVNPSKRQRTC

SEQ ID NO: 602 - DNA, 762 bp, Artificial Sequence
  Description of Artificial Sequence: Synthetic polynucleotide
atgagcgcgggcaagcatctgtccaaggggtcgaccatccccgaactgcccgatgacggcatgctccgcctgtatagcatgcgcttctgcccgtattcccatcgcgtgcatctcgtgctggatgccaagaagatcccctatcatgccatcttcatcgacgtctccgacaagccggaatggctgaccgacctcaacccgctgggtaaggtcccggcgctgcagctggtcaaagaaacgggccaaccggcgctggtcgagtcgctcatcatctccgagtatctggacgagaagtaccccgagaaccgcctgttcccgaaggaccccctgaaaaaggcccaggacaagatcctgatcgaacgcttcaacccggtgatcggcgcgatgtacaagatgttcgtcagcccggaagtggtccccggcgccatcaccaacctcagcaccggcctggacatcttcgaagatgagctccagaaacgcggttccgcctacttcggcggtgacaagccgggcatgctggactacatgatctggccgtggtgcgaacgctccgagatgctgaagtgcctgctgggtaacaagtacgagatggacaaggagcgcttcaacaacctgctgaagtggcgtgacctgatgatcgaagatgaggccgtgaagtgcttctacctggacggcgagacgcacgcgaagttcatgaaaacccggcgggaggggaatccgaactacaacatgctggtgaaccccagcaaacgccagcggacctgc

SEQ ID NO: 603 - protein, 224 aa, Artificial Sequence
  Description of Artificial Sequence: Synthetic polypeptide
MAFCPFSHRVHLMLAAKQIEHHKIYVDLIEKPEWYKDYSPLGKVPAVQLTGVEDQPTLVESLIIAEYLDQQYPQTRLFPKDPLQKALDKILIERFAPVVSAIYPVLTCNPNAPTDAIPKFENALDVFEVELGKRGTPYFAGQSIGIVDYMIWPWFERFPSMKINTEQKYELDAKRFEKLLKWRDLMAQDEVVQKTALDVQLHAEFQKSKTLGNPQYDIAFKGKL

SEQ ID NO: 604 - DNA, 672 bp, Artificial Sequence
  Description of Artificial Sequence: Synthetic polynucleotide
atggccttctgcccgttctcgcaccgtgtccacctgatgctggccgcgaagcaaatcgagcaccataagatctatgtcgacctcatcgagaagccggagtggtacaaggactactcgcccctgggcaaagtcccggccgtgcaactgaccggcgtcgaggaccagcccaccctggtcgaaagcctcatcatcgccgagtacctggatcaacagtacccgcagacgcgcctcttcccgaaggaccccctgcagaaggccctggacaagatcctcatcgaacgtttcgcccccgtcgtctcggccatctacccggtcctcacctgcaatcccaacgcgccgaccgacgccatcccgaagttcgaaaacgccctggatgtgttcgaagtggaactcgggaagcggggcaccccgtatttcgccggccaaagcatcgggatcgtggactacatgatctggccgtggttcgagcggttcccctcgatgaagatcaacaccgaacagaagtacgagctggacgccaagcgcttcgaaaagctgctcaagtggcgcgacctgatggcgcaggacgaggtggtccaaaagaccgccctggatgtccagctgcacgccgagttccagaagtcgaagacgctggggaacccgcagtacgatatcgcgttcaaggggaagctg

SEQ ID NO: 605 - protein, 239 aa, Artificial Sequence
  Description of Artificial Sequence: Synthetic polypeptide
GSPKPDLPEDGVWRLFTMAFCPFVQRVRLVLDAKQIAYHKIFIDLIEKPEWYKEYSPLGKVPALQLTNLKDQPTLIESLVIAQFLDEQYPEPKLFPTDPLQNAQDKILIERFAPVVSALYPVLTCNPNAPQDALQNFEKALNVFEQELISRGTPYFGGEKIGIVDYMIWPWFERIPSLKYTTEQKYELDAKRFGQLLKWRNLVAQDEAVKQSAQDPQVHAKFQLSKLEGKPNYDIAFNN

SEQ ID NO: 606 - DNA, 717 bp, Artificial Sequence
  Description of Artificial Sequence: Synthetic polynucleotide
ggctccccgaaacccgacctgcccgaggacggcgtctggcggctcttcacgatggcgttctgtccgttcgtccaacgcgtgcggctcgtgctggacgccaagcagatcgcgtaccacaagatcttcatcgacctcatcgaaaagccggagtggtacaaggagtacagccccctgggtaaggtcccggccctgcagctcaccaacctcaaggatcagccgaccctgatcgaatccctggtgatcgcgcagttcctggacgagcagtacccggaacccaagctgttcccgaccgatccgctgcagaacgcccaggacaagatcctgatcgagcgtttcgccccggtggtcagcgccctgtatccggtgctgacctgcaacccgaacgccccgcaagatgcgctgcagaacttcgagaaggcgctgaacgtgttcgagcaggagctgatcagccgcgggacgccgtacttcgggggcgaaaagatcggtatcgtcgattacatgatctggccgtggttcgaacgcatcccctcgctcaagtacaccacggagcagaagtacgagctggatgccaaacgcttcggccagctgctgaagtggcggaacctggtggcgcaggacgaggccgtgaagcaatccgcccaggacccgcaggtccatgcgaagttccagctctccaagctggaaggcaaacccaactatgacatcgcgttcaacaac

SEQ ID NO: 607 - protein, 241 aa, Artificial Sequence
  Description of Artificial Sequence: Synthetic polypeptide
MSSAKHLTVGSKAPPVENGKLRLYSMRFCPYAQRIHLVLDAKKIPYDVVYVNLSQKPEWLVEKSPLGKVPCLELENGDTLYESLVIAEYLDEAYPEHHLFPTDPLAKAKDKLLIERFNDVITSMYKLYSGKTVDKDLFNEALLGLEIFDRELAKRATPFFGGNQPGMLDLMIWPWCERADIIRILRGEQFVIPRERFLRLLEWKLAMKEDPAVKGSFLDAETHAKYMKSRQAGAPQYDLLV

SEQ ID NO: 608 - DNA, 723 bp, Artificial Sequence
  Description of Artificial Sequence: Synthetic polynucleotide
atgtcgtcggcgaagcacctcacggtgggctccaaggcgcccccggtcgagaatggcaagctccgcctgtactccatgcggttctgcccgtacgcccaacgcatccacctggtgctcgacgccaaaaagatcccgtacgacgtggtgtacgtgaatctgagccagaagccggagtggctggtggagaaatcgccgctgggtaaagtcccgtgcctggagctcgaaaacggcgacaccctgtacgagagcctcgtcatcgccgagtatctggatgaagcgtaccccgagcaccatctgttcccgaccgatcccctggccaaggcgaaggataagctcctgatcgagcggttcaacgacgtgatcacctccatgtataagctgtactcgggcaagaccgtggacaaggacctgttcaacgaagccctgctgggcctggagatcttcgaccgggaactggccaagcgcgccaccccgttcttcggtgggaatcagccgggcatgctggatctgatgatctggccgtggtgcgagcgtgccgatatcatccgcatcctccgtggcgagcaattcgtcatcccgcgtgaacgcttcctccgcctgctggagtggaaactcgccatgaaggaagaccccgccgtcaaaggtagcttcctggacgcggaaacccatgccaagtacatgaaatcccgccaggccggcgcgccccagtacgatctgctcgtc

SEQ ID NO: 609 - protein, 211 aa, Artificial Sequence
  Description of Artificial Sequence: Synthetic polypeptide
MSVKHLSTGSVPPPVVPGKLRLYSMRFCPYAQRVHLVLDTKKIPYDVVYVNLTNKPEWLIEKSPLGKVPCIEFEDGQVLYESLIIADYLNEAHPEPNLYPSDPKAKAKDKILIERFNGLISLMYKFYLSPSVDRDMFEEALKVLEFFDRELVSRASPFFGGVKPGMVDLMIWPWFERADIIRIMRGEDYVIPRERVPRIMEWKAAMKEDPG

SEQ ID NO: 610 - DNA, 633 bp, Artificial Sequence
  Description of Artificial Sequence: Synthetic polynucleotide
atgagcgtcaaacacctctcgacgggctccgtgccgccgccggtcgtccccggtaagctgcgcctctacagcatgcgcttctgcccctatgcgcaacgggtgcacctcgtcctggacacgaaaaagatcccgtacgacgtcgtctacgtcaacctcaccaacaagccggagtggctcatcgagaagtccccgctcggcaaagtgccgtgtatcgagttcgaagacggccaggtgctgtacgagtcgctgatcatcgccgactacctgaacgaagcgcatcccgagccgaacctgtacccgtcggacccgaaggccaaggcgaaggacaagatcctgatcgaacgcttcaacggcctcatcagcctgatgtacaagttctacctcagcccctccgtcgatcgcgacatgttcgaggaagcgctgaaggtgctggagttcttcgaccgcgaactggtctcccgcgcctcgccgttcttcggcggtgtcaagccggggatggtggacctgatgatctggccgtggttcgaacgcgcggacatcatccgtatcatgcgcggggaagattacgtcatcccgcgggagcgtgtgccgcgcatcatggaatggaaggccgccatgaaggaagatcccggc

SEQ ID NO: 611 - protein, 239 aa, Artificial Sequence
  Description of Artificial Sequence: Synthetic polypeptide
MAGDHSRSLGKGSAAPGPVPEGVIRLYSMRFCPFAQRTRLVLRAKGIRHEVVNINLKNKPDWIFEKNPDGLVPVLETSKGQLIYESPITCEYLDEAFPGRKLMPSDPYERALQKMLLEHFSKITSVISKALKEGGDLTALTAELAEKFGKLDEILSQRNTVFYGGDSTSLIDYMMWPWFERLEAFQLKDVLTHTPKLQHWMEAMRKDPAVKDTITDTQTFRSFLQLYFKNSPEACDYGL

SEQ ID NO: 612 - DNA, 717 bp, Artificial Sequence
  Description of Artificial Sequence: Synthetic polynucleotide
atggccggcgaccattcccgtagcctgggtaaaggcagcgccgcgccgggtcccgtccccgaaggggtcatccgtctctacagcatgcgcttctgtcccttcgcgcagcgtacccgcctggtcctgcgcgcgaaaggtatccgccacgaggtggtgaatatcaacctgaagaacaagcccgactggatcttcgagaagaacccggacggcctggtgcccgtgctggaaacctcgaagggccagctgatctatgaaagcccgatcacctgcgagtacctggacgaggcgttccccggccggaagctgatgccgtccgatccgtacgaacgtgccctgcagaaaatgctcctggaacacttcagcaagatcacctcggtgatcagcaaagcgctgaaagaaggcggcgacctgaccgccctgaccgcggaactcgccgaaaaattcggcaagctggacgaaatcctctcgcagcggaataccgtgttctatggtggtgactcgaccagcctgatcgactacatgatgtggccgtggttcgaacgcctcgaagccttccagctcaaagatgtgctgacccacacgcccaagctccaacattggatggaggcgatgcggaaggacccggccgtcaaggacacgatcaccgacacccaaacgttccgcagcttcctgcaactgtacttcaagaactcgcccgaagcctgcgactacggcctg

SEQ ID NO: 613 - protein, 246 aa, Artificial Sequence
  Description of Artificial Sequence: Synthetic polypeptide
MINVLSKSSTKPQLPDDGVLRVYSMRFCPFSQRVHLILDAKKIPHHKIYIDLIDKPEWYKDYSPLGKVPALQLTDVKDQPTLVESMIIAEFLDEQYPELRLFPSDPLHKAQDKILIERFAPVVNAVYPVLTCNSNAPKDALTNFETALDAFEQELAKRGTPYFAGQTIGIVDYMIWPWFERFPSLKLTTEHKYELDAKRFGLLLKWRDLVAQDEAVRKTALDAQLHADFQGSKRLGKPQYDIAFKA

SEQ ID NO: 614 - DNA, 738 bp, Artificial Sequence
  Description of Artificial Sequence: Synthetic polynucleotide
atgatcaatgtcctgagcaagtccagcaccaagccccagctgcccgacgatggggtgctgcgcgtgtacagcatgcggttctgtcccttcagccaacgcgtgcacctcatcctggacgcgaagaagatcccccaccacaagatctacatcgacctgatcgataagcccgagtggtacaaggattactcgccgctcggcaaggtcccggcgctgcagctcacggatgtcaaggaccaacccacgctggtcgaaagcatgatcatcgccgagttcctcgacgaacagtacccggaactccgcctcttcccgtccgatccgctgcacaaagcccaggacaagatcctgatcgaacgcttcgcgcccgtcgtcaacgccgtgtaccccgtgctgacctgtaacagcaacgccccgaaggacgccctgaccaatttcgaaaccgcgctggacgccttcgaacaggaactcgcgaagcgtggtaccccctacttcgcgggccagaccatcggcatcgtcgactatatgatctggccctggttcgaacggttcccgtccctcaagctcaccacggaacacaagtatgagctggacgcgaagcggttcggcctgctcctgaaatggcgcgatctcgtcgcccaggatgaggcggtgcggaagaccgccctggatgcccagctgcacgccgacttccagggtagcaagcgtctgggcaaaccccaatacgacatcgcgttcaaggcc

SEQ ID NO: 615 - protein, 240 aa, Artificial Sequence
  Description of Artificial Sequence: Synthetic polypeptide
MSGESSRSLGKGSAPPGPVPEGQIRVYSMRFCPFAQRTLMVLKAKGIRHEVININLKNKPEWFFEKNPLGLVPVLENSQGHLVTESVITCEYLDEAYPEKKLFPDDPYKKARQKMTLESFSKVPPLIASFVRSKRKEDSPNLREALENEFKKLEEGMDNYKSFLGGDSPSMVDYLTWPWFQRLEALELKECLAHTPKLKLWMAAMQQDPVASSHKIDAKTYREYLNLYLQDSPEACDYGL

SEQ ID NO: 616 - DNA, 720 bp, Artificial Sequence
  Description of Artificial Sequence: Synthetic polynucleotide
atgtccggcgagagcagccggtcgctggggaagggtagcgccccgcccggtccggtcccggaaggtcagatccgtgtctattcgatgcggttctgccccttcgcgcaacgcacgctcatggtgctgaaggccaagggtatccggcatgaagtcatcaacatcaacctgaagaacaagcccgagtggttcttcgaaaagaatcccctgggcctcgtgccggtgctggaaaacagccaaggccatctggtcacggagtccgtcatcacctgcgagtacctggacgaggcctacccggagaagaagctgttccccgatgatccgtacaagaaagcccggcagaagatgacgctggagagcttctcgaaggtgccgcccctcatcgcctccttcgtgcgctcgaagcgtaaggaggactcgccgaacctccgggaggccctggagaacgagttcaagaagctggaggagggcatggacaactacaagagcttcctgggcggtgatagcccgtcgatggtggactatctgacctggccgtggttccaacgcctggaagccctggagctgaaggagtgcctggcgcataccccgaagctgaaactgtggatggccgccatgcagcaagaccccgtcgcgtccagccataagatcgacgccaagacctatcgcgagtacctgaacctgtatctgcaggactccccggaagcctgcgactacggcctg

SEQ ID NO: 617 - protein, 224 aa, Artificial Sequence
  Description of Artificial Sequence: Synthetic polypeptide
MPDPSLTLISHPLCPFVQRAAIVLLEKNVPFERINVDLSAKPDWFLALSPTGKVPLLKVHQIDEEDAILFESMVICEYLEETQGGAAMYPEDALPRARQRAWIEFATQTLADGWQFLNATDPATADAKRAAFRDRLRKLEAELGSGPYFAGAAFGMVDAVYAPLFRYFAIIDPAVSQAIFEGFPRVSAWRAALAARPSVRNAVVEDYADRFRAHLRQHQALLAA

SEQ ID NO: 618 - DNA, 672 bp, Artificial Sequence
  Description of Artificial Sequence: Synthetic polynucleotide
atgcccgacccgagcctgaccctgatctcgcatcccctgtgcccgttcgtgcagcgtgccgccatcgtgctcctggagaagaatgtcccgttcgaacggatcaacgtggacctctcggccaagcccgactggttcctggcgctgagcccgacgggcaaggtgccgctcctcaaggtccatcagatcgacgaggaagacgccatcctgttcgagtccatggtcatctgcgagtacctggaggaaacgcagggcggcgcggccatgtacccggaggatgccctgccgcgtgcgcgccagcgcgcgtggatcgagttcgccacccaaacgctggcggacggctggcagttcctcaacgccaccgatccggccaccgccgacgccaagcgcgccgccttccgcgatcgcctgcgcaagctggaagccgaactcggctcgggcccgtatttcgccggggcggccttcggcatggtggacgccgtgtatgccccgctgttccggtacttcgccatcatcgacccggccgtgtcccaagccatcttcgagggtttcccgcgcgtgtcggcctggcgtgccgcgctcgccgcccggccgtcggtgcgcaacgccgtggtggaggactacgcggatcgcttccgcgcccacctccgccagcatcaggccctgctggcggcc

SEQ ID NO: 619 - protein, 251 aa, Artificial Sequence
  Description of Artificial Sequence: Synthetic polypeptide
MALPQKHFKRGSTKPELPEDGVPRFFSMAFCPFSHRVRLMLAAKHIEHHKIYVDLIEKPEWYKDFSPLGKVPALQLTGVKDQPTLVESLIIAEYLDQQYPQTRLFPTDPLQKALDKILIERFAPVVSAIYPVLTCNPNAPKDAIPNFENALDVFEVELGKRGTPYFAGQHIGIVDYMIWPWFERFPSMKINTEQKYELDTKRFEKLLKWRDLMTQDEVVQKTALDVQLHAEFQKSKTLGNPQYDIAFKGTP

SEQ ID NO: 620 - DNA, 753 bp, Artificial Sequence
  Description of Artificial Sequence: Synthetic polynucleotide
atggcgctcccccagaagcacttcaaacgcggtagcacgaaaccggaactccccgaggacggcgtgccgcggttcttcagcatggccttctgtccgttcagccatcgtgtgcggctgatgctggccgcgaagcatatcgaacatcacaagatctacgtggacctgatcgagaagcccgagtggtacaaggatttctcgccgctcggtaaggtcccggccctccagctcaccggggtgaaagaccagccgacgctggtggagtcgctgatcatcgcggagtacctggaccagcagtacccccagacgcgcctcttccccaccgacccgctgcagaaagcgctcgataagatcctcatcgaacgtttcgccccggtcgtctccgccatctatcccgtcctgacctgtaatccgaacgcgcccaaggacgcgatccccaatttcgaaaacgccctcgacgtcttcgaagtggagctcggcaagcgcgggaccccctatttcgcggggcagcatatcggtatcgtggactacatgatctggccgtggttcgagcgcttcccgtcgatgaagatcaacaccgagcagaagtacgagctggataccaagcgcttcgagaagctgctgaagtggcgggacctcatgacgcaggacgaggtggtccaaaagaccgccctggacgtgcaactgcacgcggagttccagaagagcaagacgctgggtaacccgcagtacgacatcgcgttcaaggggaccccc

SEQ ID NO: 621 - protein, 238 aa, Artificial Sequence
  Description of Artificial Sequence: Synthetic polypeptide
MSPSLTLISHPLCPFVQRAAIVLLENAAAFERIDVDLSAKPDWFLALSPTGKVPLLRIGQPGGSVATVFESVVICNYLNDTSGKPSLYPNDPLQRAQQRAWIEFATPTFADGWQFLNASDQTGAEAARAAFRGKMQKIEDVLGEGPYFAGSAFGMVDVVFAPMLRYFDLLQADISAPIFDGLPRVREWRAALAARQSVISAVGPDYASRFQQHLQRQRALLADAVRVPGDPANANAQG

SEQ ID NO: 622 - DNA, 714 bp, Artificial Sequence
  Description of Artificial Sequence: Synthetic polynucleotide
atgtccccgagcctgaccctgatcagccacccgctgtgccccttcgtgcagcgtgcggcgatcgtgctgctggagaacgccgccgccttcgaacgcatcgacgtcgatctgagcgcgaaacccgattggttcctcgccctgagcccgaccggcaaagtccccctgctgcggatcggccagccgggcggtagcgtcgcgaccgtgttcgagtcggtcgtgatctgtaactatctgaacgacacgtcgggcaagccgagcctgtatcccaacgacccgctgcagcgtgcccagcagcgcgcctggatcgagttcgcgacgccgaccttcgcggacggctggcaattcctgaacgcctcggaccagacgggcgccgaagcggcccgtgccgcgttccgcgggaagatgcagaagatcgaggacgtgctgggtgaagggccgtacttcgccggttccgccttcggtatggtggacgtcgtcttcgccccgatgctgcgttatttcgacctcctccaagccgacatctcggccccgatcttcgatgggctcccgcgcgtgcgcgaatggcgtgccgccctcgcggcgcgccagtcggtcatctcggcggtgggcccggattatgcgagccgcttccagcaacatctgcagcgtcagcgggccctcctggcggacgcggtgcgcgtcccgggcgacccggccaacgccaatgcccagggt

SEQ ID NO: 623 - protein, 242 aa, Artificial Sequence
  Description of Artificial Sequence: Synthetic polypeptide
MSGDSSLSLGKGSLAPGPVPEGIIRLYSMRYCPFAQRTRLVLKAKGIKHEIVNINLKNKPDWFFEKNPGGLVPVLETSKGQLIYESSITCEYLDEAYPENKLYPTDPYEKAFQKMTLELFSTLLSLAYKHLFGVKNGEDMSAVKKEYSEKLLKFEEILVNRNTTFFGGNSVSMIDYLIWPWFERLELFQLQDCLDHLPKLKEWVEVMMLDPAVQATTSDLQKIKGFFDLYLKNSHEACDYGL

SEQ ID NO: 624 - DNA, 726 bp, Artificial Sequence
  Description of Artificial Sequence: Synthetic polynucleotide
atgtcgggggacagctccctctccctgggcaaaggctcgctcgccccgggtcccgtcccggaaggtatcatccgtctgtacagcatgcggtattgccccttcgcccaacgtacccggctggtgctgaaggcgaaggggatcaagcacgaaatcgtgaacatcaacctgaagaacaagccggactggttcttcgagaagaacccgggcgggctcgtgccggtcctggagacctccaagggccaactgatctatgagtcgtccatcacctgcgagtacctggatgaagcctaccccgagaacaagctctaccccacggacccctatgagaaggcgttccagaagatgaccctggagctgttctcgaccctgctgtccctcgcgtataagcacctcttcggcgtgaagaacggtgaggacatgagcgccgtgaaaaaggaatactcggagaagctcctgaagttcgaggagatcctggtgaaccgcaataccaccttcttcgggggtaactcggtctccatgatcgactacctcatctggccctggttcgagcgcctcgaactgttccagctgcaggactgcctggaccacctgcccaagctgaaagaatgggtcgaagtcatgatgctggacccggccgtgcaggcgaccacgtcggatctgcaaaagatcaagggcttcttcgatctctacctgaagaacagccatgaagcgtgcgattacggtctg

SEQ ID NO: 625 - protein, 266 aa, Artificial Sequence
  Description of Artificial Sequence: Synthetic polypeptide
TNISRLGNYFKIVNKMALPQKHFKRGSTKPELPEDGVPRFFSMAFCPFSHRVRLMLAAKHIEHHKIYVDLIEKPEWYKDFSPLGKVPALQLTGVKDQPTLVESLIIAEYLDQQYPQTRLFPTDPLQKALDKILIERFAPVVSAIYPVLTCNPNAPKDAIPNFENALDVFEVELGKRGTPYFAGQHIGIVDYMIWPWFERFPSMKINTEQKYELDTKRFEKLLKWRDLMTQDEVVQKTALDVQLHAEFQKSKTLGNPQYDIAFKGTP

SEQ ID NO: 626 - DNA, 798 bp, Artificial Sequence
  Description of Artificial Sequence: Synthetic polynucleotide
accaatatctcgcgcctggggaactatttcaaaatcgtcaacaagatggcgctcccgcagaagcacttcaagcgcggctccaccaagcccgagctgcccgaagatggtgtcccccgcttcttctccatggccttctgccccttctcgcatcgtgtccggctgatgctcgccgcgaagcacatcgagcatcataagatctacgtggacctgatcgagaagccggagtggtacaaggacttcagcccgctcggcaaggtccccgccctgcagctgaccggcgtcaaagaccaaccgaccctggtcgagtcgctgatcatcgcggaatacctcgaccagcaatacccccagacccgcctcttcccgaccgatcccctgcagaaggcgctcgacaaaatcctgatcgagcggttcgcgccggtcgtctccgccatctatccggtgctgacctgcaaccccaacgcccccaaagatgcgatcccgaacttcgagaatgccctggacgtgttcgaagtcgagctgggcaagcgcggtacgccctacttcgcggggcaacatatcggcatcgtggactacatgatctggccgtggttcgagcgcttcccctcgatgaagatcaacaccgagcagaagtacgaactggacaccaagcgtttcgagaagctgctcaagtggcgcgacctgatgacccaggacgaagtcgtgcagaagaccgccctcgatgtgcaactgcacgcggagttccagaagagcaagaccctcggcaacccgcaatacgacatcgcgttcaagggcaccccg

SEQ ID NO: 627 - protein, 246 aa, Artificial Sequence
  Description of Artificial Sequence: Synthetic polypeptide
MINILSKSSTKPQLPEDGVLRVYSMRFCPFSQRVHLILDAKKIPHHKIYIDLIDKPEWYKDYSPLGKVPALQLTDVKDQPTLVESMIIAEFLDEQYPELRLFPSDPLHKAQDKILIERFAPVVNAVYPVLTCNANAPKDALTNFETALDAFEQELAKRGTPYFAGQTIGIVDYMIWPWFERFPSLKLTTEHKYELDAKRFGLLLKWRDLVAQDEAVRKTALDAQLHADFQGSKRLGKPQYDIAFKA

SEQ ID NO: 628 - DNA, 738 bp, Artificial Sequence
  Description of Artificial Sequence: Synthetic polynucleotide
atgatcaatatcctgtccaagagctcgaccaagccgcagctcccggaggatggggtcctgcgtgtctacagcatgcggttctgtccgttctcccagcgggtccatctcatcctggacgcgaagaaaatcccccaccacaagatctacatcgacctgatcgacaagccggagtggtacaaggattactcgcccctggggaaggtgccggccctgcagctgacggacgtcaaagaccagcccacgctggtggagagcatgatcatcgcggagttcctggacgagcagtatcccgaactgcgtctgttcccgagcgacccgctgcacaaggcccaggacaagatcctgatcgagcgtttcgccccggtggtgaacgccgtctacccggtgctgacctgcaatgcgaatgccccgaaggatgccctcaccaatttcgaaaccgcgctggatgcgttcgaacaggagctcgccaagcgcggcaccccgtacttcgccggccagaccatcggcatcgtggattatatgatctggccgtggttcgagcgcttcccgagcctgaagctgaccaccgaacacaagtacgagctcgacgccaagcgtttcgggctcctgctgaagtggcgcgacctcgtcgcccaagatgaagccgtccgtaagacggccctcgatgcgcagctgcatgccgacttccaggggtcgaagcgcctggggaagccgcagtacgacatcgcgttcaaggcc

SEQ ID NO: 629 - protein, 247 aa, Artificial Sequence
  Description of Artificial Sequence: Synthetic polypeptide
MVSPKINFNTKHLGKGDPLPPWSGKLRVYNMRLCPFAQRTILTLNAKQIDYEVINIDLVNKPEWLPTKSIFGKVPTIEVEDGVCICESLIIAEYLEEVYPEIPLISKDPIKKAYEKIIIEASEPIFVMYFKVMRTPDTINDETLMSYHKALTFFEGQLRNRGTRFLGGEKPGFADYMIWPWFERIQSMNDEKLKIKSAKFDLLVAYIENMYKDPAVSQYLLPKDVMDKLHAEYKTGKFEVQSIEDLL

SEQ ID NO: 630 - DNA, 741 bp, Artificial Sequence
  Description of Artificial Sequence: Synthetic polynucleotide
atggtctcgccgaagatcaacttcaacacgaagcacctcggtaagggcgatccgctcccgccgtggagcggcaagctccgtgtgtacaatatgcggctctgcccgttcgcgcaacggacgatcctcaccctcaacgccaagcagatcgactatgaggtcatcaatatcgacctggtcaacaagcccgaatggctcccgaccaaaagcatcttcggcaaggtcccgaccatcgaggtcgaagatggcgtctgcatctgtgagtccctgatcatcgcggagtacctggaagaggtctacccggaaatccccctcatctcgaaggaccccatcaagaaggcgtacgaaaagatcatcatcgaagccagcgaaccgatcttcgtcatgtacttcaaggtcatgcgcacgcccgataccatcaacgatgagaccctgatgtcctaccataaggccctgacgttcttcgaaggccagctgcggaatcgtggtacgcggttcctgggcggtgagaagcccggcttcgcggattacatgatctggccgtggttcgagcgtatccaatcgatgaacgacgagaagctgaagatcaagtccgccaagttcgacctgctggtggcctacatcgagaacatgtacaaggacccggcggtctcgcagtatctgctgccgaaagacgtgatggacaagctgcatgcggaatacaagaccggcaagttcgaggtgcagtcgatcgaagacctgctc

SEQ ID NO: 631 - protein, 241 aa, Artificial Sequence
  Description of Artificial Sequence: Synthetic polypeptide
MSGGSARSLGKGSAPPGPVPEGLIRVYSMRFCPFAQRTLLVLNAKGIRHQVININLKNKPEWFFQKNPSGLVPVLENSQGQLIYESAITCEYLDEAYPGKKLLPDDPYEKACQKMVFELSSKVPPLLIRFIRRENEADCSGLKEELRKEFSKLEEVLTKKKTTYFGGSSLSMIDYLIWPWFERLEALELNECIDHTPKLKLWMAAMMKDPAVSALHIEPRDLRAFNDLYLQNSPEACDYGL

SEQ ID NO: 632 - DNA, 723 bp, Artificial Sequence
  Description of Artificial Sequence: Synthetic polynucleotide
atgtcgggcgggagcgcccgcagcctgggtaagggttcggcgcccccgggtcccgtcccggaaggtctgatccgcgtctacagcatgcgcttctgccccttcgcccaacgcacgctgctggtcctgaatgcgaagggcatccgccaccaggtgatcaacatcaacctgaagaacaagcccgaatggttcttccagaagaacccgtcgggcctcgtgccggtcctggagaacagccaaggccagctgatctatgagtccgcgatcacgtgtgagtatctcgatgaggcctatccgggcaagaagctgctcccggacgatccgtatgagaaagcctgccagaagatggtcttcgaactcagcagcaaagtgccgccgctgctgatccggttcatccgtcgtgagaatgaagcggattgctccggcctgaaggaggaactgcgcaaggagttctcgaagctggaggaggtgctgaccaagaagaagacgacctatttcggtggcagctcgctgagcatgatcgactacctgatctggccctggttcgagcggctggaggcgctggagctgaacgagtgcatcgaccataccccgaaactgaagctgtggatggcggcgatgatgaaggaccccgccgtgtcggccctgcacatcgaaccccgtgacctccgcgccttcaacgatctgtatctccagaactcccccgaggcctgcgattatggcctg

SEQ ID NO: 633 - protein, 240 aa, Artificial Sequence
  Description of Artificial Sequence: Synthetic polypeptide
MASSPKCLGKECSAPGPVPNGQIRLYSMRFCPFAQRTRLVLTAKGVKHDIININLVSKPDWFLKKNPFGTVPVLETSSGQVIYESPITCEYLDEVYPEKKLLPSDPFERAQQKMLLELYSKVIPYFYKISMGKKRGEDVSTAEAEFTEKLLQLNEALANKKTKYFGGDSITMIDYLIWPWFERAEMMGVKHCLAKTPELRKWIELMFEDPVVKATMFNTDVHKVFFDSYMDGKPNYDYGL

SEQ ID NO: 634 - DNA, 720 bp, Artificial Sequence
  Description of Artificial Sequence: Synthetic polynucleotide
atggcctcgtccccgaagtgtctgggcaaggaatgctcggcccccggcccggtgcccaatggccagatccgcctgtattccatgcgtttctgcccgttcgcgcaacgcacgcggctggtcctgaccgccaagggcgtgaagcacgacatcatcaacatcaacctggtcagcaagccggactggttcctcaagaagaacccgttcggcaccgtccccgtcctggagaccagcagcgggcaggtgatctatgaaagccccatcacctgcgagtatctcgatgaagtgtacccggagaagaagctgctgccgtccgaccccttcgaacgtgcccagcaaaagatgctcctggaactctactccaaggtgatcccgtatttctacaagatctcgatgggcaagaagcggggcgaagacgtgtccaccgcggaagccgagttcaccgagaaactcctgcagctcaacgaagcgctggcgaacaagaagaccaagtacttcgggggcgactcgatcacgatgatcgactacctgatctggccctggttcgaacgcgcggaaatgatgggcgtcaagcactgcctggcgaagaccccggaactgcgcaagtggatcgagctgatgttcgaggaccccgtcgtgaaggccacgatgttcaacaccgacgtccacaaggtgttcttcgatagctacatggatggcaagccgaactacgattacggcctc

SEQ ID NO: 635 - protein, 225 aa, Artificial Sequence
  Description of Artificial Sequence: Synthetic polypeptide
MTALTLISHPLCPFVQRAVIVLLEKGVEFDRIDVDLSAKPDWFLALSPTGKVPVLKVRQANAEDAILFESVVICEYLNETQGGAPMYPVDALPRAQHRAWIEFAAQTFAEGWQFLHARDSATADAKRAAFRERLGKLESEMDTGPFFAGQAFGMVDAVYAPLFRYFDITPATVAYQIFDGLPRISAWRSALAERPSVRHAVVEDYADRFQRHLREQGSFIAVSSR

SEQ ID NO: 636 - DNA, 675 bp, Artificial Sequence
  Description of Artificial Sequence: Synthetic polynucleotide
atgacggcgctcaccctgatctcgcatcccctgtgtccgttcgtccagcgggccgtcatcgtcctgctggagaagggcgtggagttcgaccggatcgacgtggacctcagcgccaagcccgactggttcctggccctgagcccgaccggcaaggtccccgtgctgaaggtccgccaggccaacgccgaggacgccatcctgttcgagtccgtcgtcatctgtgagtacctcaacgagacgcaagggggcgcgccgatgtacccggtggatgccctgccgcgtgcccaacatcgcgcgtggatcgagttcgccgcccaaacgttcgcggagggctggcagttcctgcatgcgcgcgattcggccacggccgacgcgaagcgcgcggccttccgcgagcgcctgggcaagctggaaagcgagatggacacgggcccgttcttcgccggccaggccttcggcatggtcgatgcggtgtacgcgcccctgttccgctatttcgacatcaccccggcgaccgtggcctatcagatcttcgacgggctcccgcgcatctcggcctggcgcagcgccctcgccgaacgtccgagcgtgcgtcatgccgtggtggaagattatgcggaccgcttccagcggcacctgcgggaacaaggcagcttcatcgccgtgagcagccgc

SEQ ID NO: 637 - protein, 239 aa, Artificial Sequence
  Description of Artificial Sequence: Synthetic polypeptide
MSTEKCFAKGSAAPGPVPENYIRLYSMRFCPFAHRARLVLNAKGIKHDTININLKDKPDWFLERNPLGLVPTLETPAGEVIYESPITCEYLDEVYPEKKLLPSSPFGKAQQKMMLEHFSKITPYFYKIPTGRKNGEDVSGLEAELKEKFAKLNEDLVNKKTSFFGGDSITMIDYMMWPWFERLEIFELQHCLDNTPELKKWTESMWEDPAVKATMHSVDTYKAFYKTYIEGKPNYDYGL

SEQ ID NO: 638 - DNA, 717 bp, Artificial Sequence
  Description of Artificial Sequence: Synthetic polynucleotide
atgtccaccgaaaagtgcttcgccaagggtagcgccgcccccggcccggtcccggaaaactatatccgtctgtacagcatgcgcttctgtccgttcgcgcaccgcgcccgtctcgtgctgaacgcgaagggcatcaagcatgacaccatcaacatcaacctcaaggacaagcccgactggttcctcgaacggaatccgctgggcctcgtgcccaccctggaaacccccgccggggaggtgatctacgagtccccgatcacctgcgaatacctcgacgaagtctatccggagaagaaactgctgccgtcctcgccgttcggcaaggcgcagcaaaagatgatgctggagcatttctcgaaaatcaccccgtacttctataagatcccgaccggccgcaaaaatggcgaggacgtctcggggctggaagccgagctgaaggaaaagttcgcgaagctcaacgaggacctggtgaacaagaagacgtcgttcttcggcggcgacagcatcaccatgatcgactacatgatgtggccgtggttcgagcgtctggagatcttcgagctgcagcattgcctcgacaatacgccggagctcaagaagtggaccgaaagcatgtgggaagatccggccgtcaaggccacgatgcacagcgtcgacacgtacaaggcgttctacaaaacctacatcgaggggaagcccaattacgactacggcctg

SEQ ID NO: 639 - protein, 229 aa, Artificial Sequence
  Description of Artificial Sequence: Synthetic polypeptide
MMTAQLTLISHHLCPYVQRAAIALREKDVPFERVDIDLAKKPDWFLKISPLGKVPLLRIPRDGGEAILFESTVICEYLEETQAGPKLHPSDPLARARHRGWMEFGSAILSDLWVYETTRDGGTLEEKRRMLEMKFATVEAELDSGPYFSGGAFSLVDAVFAPIFRYFDVFDRISDHRIFDGLPRVTAWREVLAERPSVKAAVAEDYPQRLTAFLEKHEAALLKTERAAA

SEQ ID NO: 640 - DNA, 687 bp, Artificial Sequence
  Description of Artificial Sequence: Synthetic polynucleotide
atgatgaccgcccagctgaccctcatcagccatcatctgtgcccgtatgtccaacgcgcggccatcgccctgcgcgagaaggacgtcccgttcgagcgcgtcgacatcgacctggcgaaaaagcccgactggttcctgaagatctcgccgctggggaaagtcccgctcctgcgcatcccccgcgacggtggcgaggcgatcctgttcgagtccaccgtcatctgtgagtatctggaagaaacccaagcggggccgaaactgcacccgtccgacccgctggcccgcgcccgccatcgcggttggatggagttcggcagcgcgatcctgagcgatctgtgggtctacgaaaccacccgggatggcggtaccctggaggagaagcgccgcatgctggagatgaaattcgcgacggtcgaggccgagctcgacagcggtccgtatttctcgggcggcgccttcagcctggtggacgccgtcttcgccccgatcttccggtacttcgacgtgttcgaccggatctcggatcaccgcatcttcgatggcctgccgcgcgtcaccgcctggcgcgaagtcctcgccgaacggccgtcggtcaaagcggccgtggcggaagactacccgcagcggctcaccgcgttcctggaaaaacacgaggccgccctgctgaagaccgaacgtgcggcggcc

SEQ ID NO: 641 - protein, 241 aa, Artificial Sequence
  Description of Artificial Sequence: Synthetic polypeptide
MTGSEKCLAKGCPAPGPVPEGTIRVYSMRFCPYAQRARLVLAAKGIKHEVININLKNKPDWFFEKSPFGLVPSLETSNGQVIYESPIVCDYLDEVYPGKKLTPADPFQKAQQKMTLEHFSKVTTVLYKIMGAKKNNEDLSTVKEELQEKLLKLDEILAKQNSLFFGGSEVSMVDYMIWPWFERLIIFDAKDCLNKTTHIDKWYQQMLQDPAVKAIYIEPDVMLGFFKLYIQGDLEAYDYGL

SEQ ID NO: 642 - DNA, 723 bp, Artificial Sequence
  Description of Artificial Sequence: Synthetic polynucleotide
atgaccggcagcgagaagtgtctcgcgaagggttgtccggcgcccggtccggtgccggaaggcacgatccgggtgtattcgatgcgtttctgcccgtatgcgcagcgggcgcgtctggtcctcgcggccaagggcatcaagcatgaggtcatcaacatcaacctgaagaacaagccggactggttcttcgaaaagagcccgttcggcctggtgccgtcgctggagacctcgaatggtcaggtgatctatgaaagcccgatcgtgtgcgactacctggacgaagtctacccggggaagaagctcacgccggcggacccgttccagaaggcccaacagaagatgaccctggagcatttcagcaaggtgaccaccgtgctgtataagatcatgggcgccaaaaagaacaacgaagacctgtccacggtcaaggaggagctgcaggaaaagctgctgaagctcgatgagatcctggcgaagcagaactccctgttcttcggcggctcggaggtctcgatggtcgattacatgatctggccctggttcgagcgtctcatcatcttcgacgccaaagactgtctgaacaagacgacccatatcgacaagtggtaccagcaaatgctgcaggacccggccgtcaaggcgatctacatcgaaccggatgtgatgctgggcttcttcaagctctacatccagggcgacctggaggcctatgactacggcctg

SEQ ID NO: 643 - protein, 241 aa, Artificial Sequence
  Description of Artificial Sequence: Synthetic polypeptide
MSLKHLAAGSVAPPIVSGKIRLYSMRFCPYAQRIHLVLDAKHIPHDVVYINLTNKPEWLLEKSPLGKVPCIELEGGETLYESLVIAEYLDDAYPQNKLYPTNPLARAKDKLLIGRFNSVINTLYKLYVSTSIDRDIFDEVLSELGLFERELVSKGTPFFHGSSPGMLDFMIWPWWERSDVIRVLRGDQFTIPRDRFKRLLEWRSAMKENPVVRASYLDTEVHAKYMRSRRAGTPQYDLVTA

SEQ ID NO: 644 - DNA, 723 bp, Artificial Sequence
  Description of Artificial Sequence: Synthetic polynucleotide
atgtccctcaagcacctggcggcgggtagcgtggccccgcccatcgtcagcggcaaaatccgtctctactcgatgcgcttctgcccgtacgcgcaacgcatccacctggtcctggacgccaagcatatcccgcacgatgtggtgtacatcaacctcaccaacaagccggagtggctgctggagaagtccccgctcggcaaggtcccgtgtatcgagctggagggcggcgaaaccctgtacgagtcgctcgtgatcgccgagtatctcgacgacgcgtacccgcagaacaagctgtaccccacgaatccgctggcgcgtgcgaaggacaagctcctcatcgggcgcttcaacagcgtcatcaacaccctgtacaagctgtacgtgagcaccagcatcgaccgggatatcttcgacgaggtgctgagcgagctgggcctgttcgagcgcgagctggtcagcaagggcacgccgttcttccacgggagctccccggggatgctggacttcatgatctggccctggtgggagcgcagcgacgtcatccgggtcctccgcggcgatcagttcacgatcccgcgggaccgcttcaagcggctgctggaatggcggagcgccatgaaggagaacccggtcgtgcgcgcctcctacctggataccgaggtccacgcgaagtacatgcggtcgcgtcgtgccggtacgccgcagtacgacctggtcaccgcg

SEQ ID NO: 645 - protein, 242 aa, Artificial Sequence
  Description of Artificial Sequence: Synthetic polypeptide
MSGESPRSLGKGSPQPGPVPLGVIRLYSMRFCPFAQRTRLVLKAKGIKHEVVNINLKNKPEWFFKKHPLGLIPVLENSKGQLIHDSSITCEYLDEAYPGKKLFPEDPYEKALQKMNFEFLSKIPSLAKDVIIAIQNNEHGTPKKEELCNEFNKLEEVLNRQKTTFLGGNSVSMIDYLIWPWFERLELYEIPNCLDKTPALKLWVVAMKNDPIVAALLTDVKTFKGFYDLYFQNNPDAFDYGL

SEQ ID NO: 646 - DNA, 726 bp, Artificial Sequence
  Description of Artificial Sequence: Synthetic polynucleotide
atgtccggcgaaagcccccgcagcctggggaagggcagcccgcaacccggtcccgtcccgctcggcgtcatccgcctgtattcgatgcggttctgtcccttcgcgcaacggacccgtctggtgctgaaggcgaagggcatcaagcacgaggtcgtgaacatcaacctgaagaacaagccggaatggttcttcaaaaagcaccccctcggtctgatcccggtgctggagaactccaaaggccagctcatccacgactcgtcgatcacctgcgaatacctggatgaagcctacccgggcaagaagctgttccccgaagacccctacgaaaaggccctgcagaagatgaacttcgagttcctgagcaaaatcccctcgctggccaaggacgtcatcatcgccatccagaacaatgagcatgggaccccgaagaaggaggaactgtgcaacgagttcaacaagctggaggaagtgctgaaccgccaaaagaccacgttcctcggcggcaatagcgtcagcatgatcgactacctgatctggccctggttcgagcgcctcgaactctacgaaatcccgaactgcctggataagaccccggccctgaagctctgggtggtggcgatgaagaacgacccgatcgtggccgccctgctgaccgacgtcaagaccttcaagggcttctacgacctgtacttccagaacaacccggacgccttcgactacggcctc

SEQ ID NO: 647 - protein, 249 aa, Artificial Sequence
  Description of Artificial Sequence: Synthetic polypeptide
MSIPLKHFKQGTAKPELPEDGVLRFYLMRFCPYSERGSLVLAAKQIPHHKIYIDLSEKPDWYTDYSPLGKVPAIQLTTVEGQPALVESLVIAEYLDEQYPGRQLYPADPLQKALDKILIERLAPAVSAVYPLLFTKDPPADALSKFEQALDVFEQEIGKRGTPFFGGEQIGMVDYMIWPWFERFPALKLVLPEKYELDKDRYAKLLEWIELVAQDEAIKQTALASEMHAKFIATRQEGTPNYDVAFEEL

SEQ ID NO: 648 - DNA, 747 bp, Artificial Sequence
  Description of Artificial Sequence: Synthetic polynucleotide
atgtcgatcccgctgaagcacttcaagcaaggcacggcgaagcccgagctgccggaagacggcgtcctgcggttctacctgatgcggttctgtccgtacagcgaacgcggctcgctcgtgctggccgccaagcagatcccgcaccacaagatctacatcgacctgtcggagaagcccgactggtacacggattattcgccgctgggcaaagtgcccgccatccagctgacgacggtcgaaggtcagcccgccctcgtcgagtcgctcgtcatcgcggaatacctcgacgaacagtacccgggtcgccagctgtacccggccgatccgctccaaaaagccctggataagatcctgatcgagcgcctggcgcccgccgtctccgccgtctatccgctgctcttcaccaaagacccgccggccgatgccctctcgaaattcgaacaggccctggacgtcttcgaacaggaaatcggcaagcggggcacgcccttcttcggcggggagcagatcggcatggtcgactacatgatctggccgtggttcgagcggttccccgccctcaagctggtgctgcccgagaagtacgagctggacaaggaccgctacgccaaactgctcgaatggatcgagctggtcgcgcaggatgaagccatcaagcagaccgcgctggcctccgaaatgcacgccaagttcatcgccacccgtcaagagggcacgccgaattacgatgtggcgttcgaggagctc

SEQ ID NO: 649 - protein, 247 aa, Artificial Sequence
  Description of Artificial Sequence: Synthetic polypeptide
MSNVHLAKGSHQPAFPDDGKLRLYSMKFCPYAQRAHLVLDAKNIPYHVAYINLTEKPEWLQKVSALTKVPALEIPGHGESLIESLIIADYLDEKYPQHPLHSKDPLQKARDRILVERFDSFITPFYRIVFQRNQGGSPGAITELTNALDLYEKELRERKTKFFGGQRPGMLDYMIWPWCERSDSMKFILGDKYELDKVRFSELLKWKDEMQKDKAVKENYISPEDHFKYASLRLAGTPDYDFLAVVP

SEQ ID NO: 650 - DNA, 741 bp, Artificial Sequence
  Description of Artificial Sequence: Synthetic polynucleotide
atgagcaacgtccacctggcgaagggtagccaccaaccggcgttcccggacgacggcaagctgcgcctgtattccatgaagttctgcccgtacgcccagcgtgcccatctcgtgctggacgcgaagaacatcccctaccacgtcgcctacatcaacctgaccgagaagcccgaatggctccaaaaagtgagcgccctgacgaaggtgccggccctggagatcccgggccatggcgaatcgctgatcgaatccctgatcatcgccgactacctcgacgagaagtatccccaacacccgctgcattcgaaggacccgctgcagaaggcgcgcgatcgcatcctggtggagcgcttcgattcgttcatcacgccgttctaccgcatcgtcttccagcgcaaccagggcgggagccccggtgccatcaccgaactgaccaacgccctcgatctgtacgaaaaagagctccgcgaacgcaagaccaaattcttcgggggtcagcgccccgggatgctggactacatgatctggccgtggtgtgagcgtagcgacagcatgaagttcatcctcggggacaagtatgagctggacaaggtgcgtttctcggagctgctcaagtggaaggacgagatgcagaaggacaaggccgtcaaagagaactacatcagccccgaggaccacttcaagtatgccagcctccgcctcgccggcacccccgactacgacttcctcgcggtggtcccc

SEQ ID NO: 651 - protein, 247 aa, Artificial Sequence
  Description of Artificial Sequence: Synthetic polypeptide
MAGDHSRSLGKGSAAPGPVPEGVIRLYSMRFCPFAQRTRLVLRAKGIRHEVVNINLKNKPDWIFEKNPDGLVPVLETSKGQLIYESPITCEYLDEAFPGRKLMPSDPYERALQKMLLEHFSKVLHDQGGIITSVISKALKEGGDLTALTAELAEKFGKLDEILSQRNTVFYGGDSTSLIDYMMWPWFERLEAFQLKDVLTHTPKLQHWMEAMRKDPAVKDTITDTQTFRSFLQLYFKNSPEACDYGL

SEQ ID NO: 652 - DNA, 741 bp, Artificial Sequence
  Description of Artificial Sequence: Synthetic polynucleotide
atggccggcgaccatagccgcagcctggggaaaggctccgccgcgccgggtccggtccccgagggtgtgatccgcctgtactccatgcgtttctgcccgttcgcccaacgcacgcgcctggtgctgcgtgccaagggcatccgccatgaagtcgtgaatatcaacctgaagaacaagccggactggatcttcgagaagaacccggatggcctggtcccggtcctggagacgtccaagggccagctgatctacgaatcgccgatcacctgcgagtacctggacgaggcgttcccgggccggaaactcatgccgagcgacccgtatgagcgcgccctgcagaaaatgctgctggagcacttcagcaaggtgctgcacgaccagggcggcatcatcacctcggtgatctcgaaggcgctcaaggaaggcggggacctgaccgcgctgacggccgagctggcggaaaagttcgggaagctggacgagatcctgtcgcagcgcaataccgtgttctacggcggcgacagcacgagcctgatcgattacatgatgtggccgtggttcgaacggctggaggccttccagctgaaggatgtcctcacccacacgcccaagctgcagcattggatggaagcgatgcgcaaggacccggccgtgaaggacaccatcaccgatacccagaccttccgcagcttcctgcaactgtacttcaagaactcgcccgaggcctgtgactatgggctc

SEQ ID NO: 653 - protein, 238 aa, Artificial Sequence
  Description of Artificial Sequence: Synthetic polypeptide
MSKTITTEQLGKGAAKPALTDDGILRLYSMRYCPYAQRAHLVLNAKKVPYHVININLLEKPEWLIEVSALLKVPALQLVEEKDKPSLIESLVISEYVDEKYPQNPLLSKDPLKKAQDKILLERFSAITNAFMKILLQKTGLDDYWQGVDIFEEELKKRGTPFFGGEKPGYVDYMIWPWFERLAVVKYQFEDQYNFDEKRFENIGKWIALLKQDPVVQSYIASDEAHINFWKARFAAKK

SEQ ID NO: 654 - DNA, 714 bp, Artificial Sequence
  Description of Artificial Sequence: Synthetic polynucleotide
atgagcaaaaccatcacgacggagcagctggggaagggcgccgcgaaaccggccctgaccgacgatggtatcctccgtctctacagcatgcggtactgtccgtatgcccagcgcgcgcatctggtcctgaacgccaagaaggtcccgtatcacgtcatcaacatcaacctcctggagaagccggagtggctgatcgaggtgagcgccctcctcaaggtgccggcgctgcagctggtggaagagaaggataagccgtcgctgatcgaatccctggtgatctcggagtacgtcgacgagaagtacccccagaacccgctcctgagcaaggacccgctgaagaaagcgcaagacaagatcctcctggaacgtttcagcgccatcaccaacgccttcatgaagatcctgctgcagaagaccggtctggacgactactggcagggggtcgacatcttcgaggaggaactgaaaaagcgcggcaccccgttcttcggcggtgaaaagccgggctacgtggactacatgatctggccctggttcgaacgcctggccgtcgtcaagtaccagttcgaggaccagtataacttcgacgagaagcgtttcgagaacatcgggaagtggatcgccctgctgaagcaagatccggtcgtccagagctacatcgcgtccgacgaggcccatatcaatttctggaaggcgcgtttcgccgcgaaaaag

SEQ ID NO: 655 - protein, 233 aa, Artificial Sequence
  Description of Artificial Sequence: Synthetic polypeptide
MAHAIKENRMTKLRLYSAKACPFAHRTRLVLQEKAIDFELTEVDLQNKPRAFVDASLYGKVPAIEHEGHRIWESAIINEYLEEVFPEPRLLPREPGRRALARIWIDYANTRLVPAFTQLLRAETRDQEAAGRKALGDVLAFIEREALARSSGQGPYWLGAEVSLVDVSFYPWFERLPAVGRLRDFSIPAELTRLRAWIEAVQARPAVRAIQNPVEFYVERFAKFVKPAATTAA

SEQ ID NO: 656 - DNA, 699 bp, Artificial Sequence
  Description of Artificial Sequence: Synthetic polynucleotide
atggcccatgcgatcaaagaaaaccgcatgaccaagctgcgcctctacagcgccaaagcgtgtccgttcgcgcaccgcacccgcctcgtcctgcaagagaaggccatcgacttcgaactgaccgaggtcgacctgcagaataagccgcgcgcgttcgtcgatgccagcctctacggtaaggtcccggcgatcgagcacgaaggccaccgcatctgggagagcgccatcatcaacgagtacctggaggaggtcttccccgaaccccggctgctgccgcgcgagcccggtcgtcgggccctggcccgtatctggatcgattacgccaacacgcgcctcgtccccgcgttcacccaactgctccgcgcggaaacccgtgaccaggaggccgccggtcgcaaagccctgggcgacgtgctggccttcatcgagcgcgaagcgctggcccgcagcagcgggcaaggcccctattggctgggcgcggaggtctcgctcgtggacgtgagcttctacccgtggttcgagcgtctgcccgccgtcggtcgcctgcgtgatttcagcatcccggccgaactgacgcgcctgcgtgcctggatcgaggcggtccaggcgcggcccgccgtccgcgccatccagaaccccgtcgagttctacgtggaacgtttcgcgaaattcgtgaagcccgcggcgaccaccgccgcg

SEQ ID NO: 657 - protein, 242 aa, Artificial Sequence
  Description of Artificial Sequence: Synthetic polypeptide
MSGGSARSLGKGSPPPGPVPEGVIRVYSMRFCPFAERTRLVLNAKGIRHEVININLKNKPEWFFEKNPLGLVPVLENSQGQLIYESTITCEYLDEAYPGKKLLPDDPYEKARQKMIFELSSQVPTYGKQSVLALQCGDDYSGQKEQLHKEFSKLEEVLTNKKTTFFGGKNISMVDYLIWPWFERLEAVELIDCVDHTPKLKLWMEAMRKDPTVSALITDAKTLRGFIDLYLQNSPDACDYGL

SEQ ID NO: 658 - DNA, 726 bp, Artificial Sequence
  Description of Artificial Sequence: Synthetic polynucleotide
atgagcggcggttcggcccgctccctgggtaaaggctccccgcccccgggccccgtgcccgaaggcgtcatccgggtctactccatgcggttctgtcccttcgccgaacggacgcggctggtcctgaacgccaaaggcatccggcacgaggtcatcaacatcaacctgaagaataagccggaatggttcttcgagaagaatccgctgggcctggtcccggtgctggaaaacagccaggggcagctcatctacgaaagcaccatcacctgcgaatatctggatgaggcgtatccgggcaagaagctgctgcccgacgacccgtacgaaaaggcccgccagaagatgatcttcgaactcagctcgcaggtgccgacctacggcaagcaaagcgtcctggcgctgcagtgcggcgacgattactcgggccagaaggagcagctgcataaggagttctcgaagctggaagaggtcctgacgaacaagaagaccacgttcttcgggggcaagaatatcagcatggtggactacctgatctggccctggttcgagcgtctcgaagcggtggagctgatcgactgcgtcgaccacaccccgaagctcaaactctggatggaagcgatgcgcaaggacccgaccgtgtccgccctgatcacggatgcgaagaccctgcgcggcttcatcgacctctacctgcagaactccccggatgcgtgcgactatggtctg

SEQ ID NO: 659 - protein, 228 aa, Artificial Sequence; identical to SEQ ID NO: 303
  Description of Artificial Sequence: Synthetic polypeptide

SEQ ID NO: 660 - DNA, 684 bp, Artificial Sequence
  Description of Artificial Sequence: Synthetic polynucleotide
atgaccgcccagctgacgctcatctcccatcatctctgtccctatgtgcagcgcgccgcgatcgccctgcacgagaaaggggtgccgttcgagcgggtggacatcgatctcgcgaataagcccgactggttcctcaagatctcgccgctgggcaaagtcccgctgctccgcatcagccaagatgggggcgaggccatcctcttcgagtccaccgtgatctgcgagtacctggaggaaacccaggccggtcccaagctgcatccggccgacccgctggcgcgtgcccggcatcgtggctggatggagttcggtagcgccatcctgtccgacctgtgggtgtacgaaaccacccaggacggcgccaccctggaagccaagcgcaatgtgctgaagagcaagttcgcgacggtggaagcggagctcggctcgggcccgtacttcgccggctcggcgttctcgctggtcgatgccgtgttcgcgcccatcttccgctacttcgacgtcttcgacacgatctccgactccggcgtcttccagggcctcccccgcgtcaccgcctggcgggaagccctcgcggggcgtcccagcgtcaaggcggcggtcggcgaggattacccgcaacgcctgatggccttcctggaaaagcacgaggcggccctgctgaagacggaacgcgtggccgcc

SEQ ID NO: 661 - protein, 239 aa, Artificial Sequence
  Description of Artificial Sequence: Synthetic polypeptide
MSTEKCYSKGSAAPGPVAKDHIRLYSMRFCPFAQRTKLVLIAKGIKHDTININLKDKPDWFLEKNPLGLVPTLETAAGEVIYESPITCEYLDEVYPEKKLLPSTPFGKAQQKMMLEHFSKITPYFYKITMGRKNGDDVSGLEAELKEKMGKLNEDLDKKKTKYFGGDSITMIDYMMWPWFERMEVFGLKCCLDNAPELTKWTERMREDPAVKATSHSPDTHRAFYKTYTDGKPDYDYGL

SEQ ID NO: 662 - DNA, 717 bp, Artificial Sequence
  Description of Artificial Sequence: Synthetic polynucleotide
atgtccaccgaaaagtgctatagcaaaggctcggcggccccgggccccgtcgccaaagaccatatccggctgtactccatgcggttctgtccgttcgcccaacgtaccaaactggtgctgatcgcgaagggcatcaagcatgataccatcaacatcaacctgaaggacaagccggactggttcctggagaagaatccgctgggcctggtgccgacgctggagaccgcggccggcgaagtgatctatgaatcgccgatcacctgtgaatacctggacgaggtctatcccgaaaagaagctcctcccgtccacccccttcggcaaagcgcagcaaaagatgatgctcgaacacttctccaagatcacgccgtacttctataagatcaccatgggccggaagaacggcgacgacgtgtccggtctggaagcggagctgaaggagaagatgggcaaactgaacgaggacctggacaagaagaagaccaagtacttcggcggcgattccatcacgatgatcgactacatgatgtggccctggttcgaacgcatggaagtgttcgggctgaagtgttgcctggacaacgccccggagctgaccaagtggaccgaacgcatgcgggaagatccggcggtgaaggcgacctcgcacagcccggacacccatcgtgccttctataagacgtacaccgacggtaagccggactatgattacggcctc

SEQ ID NO: 663 - protein, 212 aa, Artificial Sequence
  Description of Artificial Sequence: Synthetic polypeptide
MKLYTYYRSTSSYRVRIALALKGLDYQSLPVNLVRDGGEHRQPAYLALNPQGRVPALQVDEGELLIQSPAIIEYLEERYPQPALLSSDPLRRARERGVAALVGCDIHPLHNASVLNLLRQWGHDEEQVRQWIGHWVGQGLAAVEQLIGDQGWCFGDRPGLADVYLVPQLYAAERFGVALDAWPRIRRVADLAAAHPAFRQAHPANQPDTPAA

SEQ ID NO: 664 - DNA, 636 bp, Artificial Sequence
  Description of Artificial Sequence: Synthetic polynucleotide
atgaagctgtacacctactatcgctcgacctcctcctaccgcgtgcggatcgccctggcgctgaagggcctggattaccagtcgctcccggtgaatctggtccgcgacggcggcgaacatcggcaaccggcgtacctggccctcaacccgcaaggccgcgtcccggcgctgcaggtggacgaaggcgagctgctgatccagtccccggccatcatcgagtatctggaggagcgctacccccagccggccctgctgtcctccgatccgctgcgccgcgcccgggaacgcggtgtggccgccctggtcggctgcgacatccatcccctgcacaacgccagcgtcctgaacctgctgcgccagtggggccacgatgaggagcaggtgcggcagtggatcggccactgggtcggccaaggcctcgccgcggtcgaacaactgatcggggatcaggggtggtgtttcggggaccgtcccggcctcgcggacgtctatctggtgccgcagctgtacgccgcggaacgcttcggggtcgccctggatgcctggccgcgtatccgccgcgtggccgatctggccgccgcccacccggcgttccgccaagcgcatccggccaatcagccggacaccccggcggcc

SEQ ID NO: 665 - protein, 212 aa, Artificial Sequence
  Description of Artificial Sequence: Synthetic polypeptide
MKLYTYYRSTSSYRVRIALALKGLDYQSLPVNLLRDGGEHRQPAYLALNPQGRVPALQVDEGELLIQSPAIIEYLEERYPQPALLSSDPLRRAQERGVAALVGCDIHPLHNASVLNLLRQWGHDEEQVRQWIGHWVGQGLAAVEQLIGDQGWCFGDRPGLADVYLVPQLYAAERFGVALDAWPRIRRVAALAAAHPAFRQAHPANQPDTPAA

SEQ ID NO: 666 - DNA, 636 bp, Artificial Sequence
  Description of Artificial Sequence: Synthetic polynucleotide
atgaagctctacacctactaccggagcacctcctcctaccgcgtccggatcgccctggccctgaaaggcctggactaccagagcctcccggtcaacctcctgcgtgatggcggcgagcaccggcagccggcctatctcgcgctgaacccgcagggtcgcgtcccggccctgcaggtggacgagggtgaactgctgatccagagcccggccatcatcgagtacctggaggagcgctacccccagccggccctgctgtcgtccgacccgctccgccgtgcgcaagagcgcggcgtcgcggcgctggtgggctgtgacatccatccgctccacaatgcgtcggtgctgaacctgctccgccagtggggccacgatgaggaacaggtgcgtcagtggatcgggcattgggtgggccaaggcctggcggcggtggaacaactcatcggtgatcaggggtggtgtttcggcgaccgccccggtctcgcggacgtctacctcgtcccgcagctgtacgccgccgaacggttcggggtggcgctggatgcctggccccgcatccgtcgggtggccgccctggccgccgcccaccccgccttccgccaagcccatccggcgaatcagccggatacccccgcggcg

SEQ ID NO: 667 - protein, 212 aa, Artificial Sequence
  Description of Artificial Sequence: Synthetic polypeptide
MKLYTYYRSTSSYRVRIALALKGLDYQSLPVNLVRDGGEHRQPAYLALNPQGRVPALQVDEGELLIQSPAIIEYLEERYPQPALLSSDPLRRARERGVAALVGCDIHPLHNASVLNLLRQWGHDEEQVRQWIGHWVGQGLAAVEQLIGDQGWCFGDRPGLADVYLVPQLYAAERFGVALDAWPRIRRVADLAAAHPAFRQAHPANQPDAPAA

SEQ ID NO: 668 - DNA, 636 bp, Artificial Sequence
  Description of Artificial Sequence: Synthetic polynucleotide
atgaagctctatacgtattaccgctccacgagcagctaccgggtgcgtatcgcgctggccctgaagggcctggactaccagagcctgccggtcaacctggtccgggatggcggcgagcatcgtcaaccggcctacctcgccctgaacccccaaggccgtgtgcccgccctgcaggtcgacgaaggcgaactgctgatccagtccccggccatcatcgagtacctggaagaacgctatccgcagccggccctgctcagcagcgatccgctgcgccgtgcccgcgaacgtggcgtggccgcgctggtggggtgcgacatccatccgctgcacaacgcgtcggtgctgaatctgctgcggcagtggggccacgacgaggagcaagtgcgccagtggatcggtcactgggtcgggcagggtctggccgcggtcgaacaactgatcggcgaccagggctggtgtttcggcgatcgtccgggcctggccgacgtctacctggtgccccagctctacgccgccgagcgcttcggcgtcgccctggacgcctggccgcgcatccgtcgggtcgcggacctcgccgccgcccatccggccttccgccaggcccacccggccaaccaaccggatgccccggcggcc

SEQ ID NO: 669 - protein, 212 aa, Artificial Sequence
  Description of Artificial Sequence: Synthetic polypeptide
MKLYTYYRSTSSYRVRIALALKGLDYQSLPVNLIRDGGEHRQPAYLALNPQGRVPALQVDEGELLIQSPAIIEYLEERYPQPALLSSDPLRRARERGVAALVGCDIHPLHNASVLNLLRQWGHDEEQVRQWIGHWVGQGLAAVEQLIGDQGWCFGDRPGLADVYLVPQLYAAERFGVALDAWPRIRRVADLAAAHPAFRQAHPANQPDTPAA

SEQ ID NO: 670 - DNA, 636 bp, Artificial Sequence
  Description of Artificial Sequence: Synthetic polynucleotide
atgaaactgtacacgtactatcgctccaccagctcgtaccgcgtgcggatcgcgctggcgctgaaagggctggattaccagtcgctcccggtcaacctgatccgcgatggcggggaacaccgccagcccgcctatctggcgctgaacccgcaaggccgcgtccccgccctgcaagtcgacgagggtgagctcctgatccagtccccggccatcatcgagtatctggaggaacggtatccccagcccgcgctcctgtccagcgaccccctgcgtcgtgcccgcgaacggggtgtggccgcgctggtgggctgcgacatccatccgctgcataacgcgagcgtcctgaacctgctccgccagtgggggcatgacgaagaacaggtgcgtcagtggatcggccattgggtcggccagggtctggccgcggtcgaacagctgatcggcgatcaggggtggtgcttcggcgatcgcccggggctggcggatgtgtacctcgtcccgcagctctacgcggccgaacgcttcggtgtggcgctggacgcctggccccgcatccgtcgggtcgccgacctggccgccgcgcatccggccttccgtcaggcccatccggccaatcagccggacacgccggcggcc

SEQ ID NO: 671 - protein, 804 aa, Artificial Sequence
  Description of Artificial Sequence: Synthetic polypeptide
MASSGSEAEAEPGTSGSGTRRRLGAAGEDLGPAGPLQRVLQLPLEAAASLSKEDAHYLEKRGRRRWWRSAQFPRVPAESEEDGRPELQRSVFYAALSPLLAFYVLFTALLYPMHASLHLNGFYAATAAVVPAGLHGLLKVIEYWTFSLFYCASELWGSVVISVLFWSLANEVCTIAEAKTVYPLMGIAANVALVLAGSWVKWVNANLVPLAGGSTQASHQLPGAMLNYLVGGIVCLTGVMMAAKFALDNWCVGDYCAIDADGTKPTAKKKKKKGSLGESFAVIRSSPKILNLALLVVSYGVSHRLFEFAWKGQLRALYPTPAAYQARAAAARRHLPRAASCRVAAARDASVLADVSIATGYCTIALMLMGKFVFQYLGWIAAASATPSIMLLAGAGFFGLSLAANQGVSVMGMDPTAMAVAGVAAGAITQVRLLAGDSHACGVLGTQLKEYEQEKASKEAAAAAAAPAPEGQRAPSTAPEGGLNGSAAGSEADASPAITPQAAAFPSARRLAEPRGSLPGGRKPAAQANTAAAAATPGGQAVALFTAEEGWQLAAPPREGTVFYTHCLCPYAERVWIALLEKGLPHRLVHIDLSRKPAWYRSVNPRGLVPALQLDGSVVVESADICRHVDAQAAGPSLTPQDPPLQRQMEALLRGPCSGAVSVGLDLMAGATARHWGIGSGQTAAQRAAFEVQLAGLDAALRQHGGPFLLGPQPSLADIMVYPFLKRYAVAQPLTGYDVGAALGGSVGRWLAAMGARPSCRTTSADDALLLQAYQQHRSLDFFDLETYSCCQLHPHNATHLLHH

SEQ ID NO: 672 - DNA, 2412 bp, Artificial Sequence
  Description of Artificial Sequence: Synthetic polynucleotide
atggcctcgtccggctccgaagccgaagcggagcccggcacctcgggttccggcacccgtcggcggctgggggccgcgggcgaagacctgggtccggcggggccgctccaacgcgtcctccagctcccgctggaggccgccgcgagcctgagcaaggaggacgcgcactatctggagaagcgtggccgccgccgctggtggcgctcggcccagttcccgcgggtcccggccgaaagcgaggaagacggccgcccggagctccagcgcagcgtcttctatgcggcgctgtcgcccctgctggcgttctacgtcctgttcacggcgctgctgtatcccatgcatgcctccctccatctgaacggcttctacgccgcgaccgcggcggtggtccccgccggcctccacggtctgctgaaggtgatcgaatactggaccttctcgctcttctattgcgccagcgagctgtggggctccgtggtcatctcggtgctgttctggagcctggcgaacgaagtctgcaccatcgcggaggccaaaaccgtctacccgctgatgggcatcgcggcgaatgtcgccctcgtcctggcgggctcctgggtgaagtgggtgaacgccaacctggtcccgctggccggcggcagcacgcaggcctcgcatcagctcccgggtgccatgctgaactacctggtgggcggcatcgtgtgcctgaccggcgtcatgatggccgccaagttcgcgctggacaattggtgtgtgggggattattgcgccatcgacgccgatggtaccaagccgaccgcgaagaagaaaaagaagaagggctccctgggcgagagcttcgccgtcatccgctcctcgccgaaaatcctgaacctggcgctcctcgtggtcagctacggtgtctcgcaccgcctgttcgagttcgcctggaagggccagctccgcgcgctgtatcccaccccggccgcctatcaggcccgtgccgcggcggcccgtcgtcacctgccgcgcgccgcctcctgtcgggtggccgccgcccgggatgcgtccgtgctggcggatgtcagcatcgcgaccggctactgtaccatcgccctcatgctgatgggcaaattcgtgttccagtacctcggctggatcgccgcggccagcgccacgccctccatcatgctgctcgcgggcgccgggttcttcggtctcagcctcgcggccaaccagggggtctccgtcatgggcatggaccccaccgccatggccgtggccggtgtcgccgccggcgcgatcacccaggtccgcctgctggcgggcgacagccatgcgtgcggcgtgctgggcacccaactgaaggagtacgagcaggagaaggcctcgaaggaggccgcggccgccgccgccgccccggccccggaaggtcagcgggcccccagcaccgcgccggagggcgggctcaacggctccgccgccggctccgaagcggacgcgagcccggccatcacgccgcaggcggcggccttcccctccgcccggcgtctggccgagccccgcggttccctcccgggcggtcgcaagccggccgcccaagccaacacggccgccgccgcggcgacccccggcggtcaggccgtggccctgttcaccgcggaagaaggctggcagctggccgccccgccgcgcgaaggcacggtgttctacacccattgcctgtgcccgtacgcggagcgcgtctggatcgcgctgctggaaaaggggctgccgcaccggctggtgcacatcgacctctcccgtaagccggcctggtatcgctcggtgaacccccgcggcctggtcccggccctgcaactggatggcagcgtggtcgtggaatccgcggacatctgccgccatgtggacgcgcaggccgccgggccgtccctgaccccgcaggacccgccgctccaacgccagatggaagcgctgctgcgcggcccgtgttccggcgcggtgagcgtgggcctggacctgatggccggcgcgaccgcccggcattggggcatcggtagcgggcagaccgcggcgcagcgcgccgccttcgaggtgcaactggcgggcctggacgcggccctccgccagcacggcggcccgttcctcctgggcccgcagccgtccctggccgacatcatggtgtatccgttcctgaaacggtacgcggtggcccagcccctcaccggctatgacgtcggggccgccctgggtggttccgtcggtcgctggctggccgccatgggcgcccggccctcgtgccgcaccaccagcgccgatgacgccctgctgctgcaggcctaccagcagcaccggagcctggacttcttcgacctggaaacgtactcctgctgccagctccacccccacaacgccacccacctgctccaccat

SEQ ID NO: 673 - protein, 226 aa, Artificial Sequence
  Description of Artificial Sequence: Synthetic polypeptide
MSNKPLTLVSHLLCPYVQRAAIALAEKNVPFERVVIDLANKPDWFIAISPLGKVPLLRLQRPDGSEAVLFESNVICEYLEETQPGPRLHPEDPLTRAEHRAWMEFGSAILGDLWGYETTRDAEVFEQKRLALAAKFERVEAALGAGPYFAGKNFSLVDAVFAPIFRYFEVFDEISNSHIFDALPKVNAWRKALAARPSVQSAVVPEYPQHLREFLRKHEAHLLALA

SEQ ID NO: 674 - DNA, 678 bp, Artificial Sequence
  Description of Artificial Sequence: Synthetic polynucleotide
atgtcgaataagccgctcacactggtgagccacctactatgtccttacgtgcagcgggccgctatcgctcttgctgagaagaacgtgcccttcgaacgcgtcgtcatcgacctcgcgaacaagccagactggttcatcgccatcagccccctcgggaaggtgcccctgctacgcctgcagagaccggacggctcagaggcggtactattcgagtcgaatgtgatctgcgagtacctggaagaaacgcagccgggccctcggctgcaccccgaagacccgctaacgcgcgctgaacatcgagcctggatggagttcggcagcgcgatcctcggcgacctgtggggctacgagactacccgggacgccgaagtattcgagcagaagcgattggccctcgccgccaagttcgaacgcgtggaagcggcactgggggcaggcccgtatttcgccggaaagaacttcagcctcgtggacgccgtcttcgcccccatattcaggtacttcgaagtgttcgacgagatcagcaacagtcacatcttcgatgccctgccgaaggtcaacgcctggcgtaaggctctcgcggcccgcccctcagtgcaatccgcggtggtaccggagtatccgcaacacctccgtgagttcctccgtaagcacgaggcgcacctgctggcgctcgcg

SEQ ID NO: 675 - protein, 242 aa, Artificial Sequence
  Description of Artificial Sequence: Synthetic polypeptide
MSGDHSRSLGKGSAAPGPVPAGLIRLYSMRFCPFAQRTRLVLRAKGISHEVININLKNKPDWYFEKNPSGLVPVLETSKGQLIWESPITCEYLDEAFPGKKLMPSDPYERACQKMLLEDFSKITPLLFKHVLAVKDEQDTTALKAEIAEKFGKLEEVLSKRNTVFYGGDSVSMVDYMIWPWFERLEPFQLKDSLNHTPKLQRWMEAMKEDPAIKATITDPQTYKNYLQLYLKNSPEACDYGL

SEQ ID NO: 676 - DNA, 726 bp, Artificial Sequence
  Description of Artificial Sequence: Synthetic polynucleotide
atgtccggcgaccattcccgcagcttgggcaagggttctgccgcgccgggaccggttcccgctggtctgatacgtctatacagtatgcgattctgtccgttcgcccaacggacacggttggtgctgcgtgccaaaggtatctcacacgaggtgatcaacatcaacctgaagaacaagcccgactggtacttcgaaaagaacccgtccggcctggtaccagtgctcgaaaccagcaagggccagctgatatgggagtcgccgatcacttgcgaatatctcgacgaagccttcccggggaagaagctgatgccctccgacccgtacgaaagagcatgccagaaaatgctcttggaagacttcagcaaaattaccccgctcctgttcaagcatgtgctggccgtcaaggatgagcaggacactaccgccctcaaggccgagatcgccgaaaagttcggcaagctagaggaggttctgtccaagcgaaacacggtcttctacggaggcgattcggtgtccatggtcgactacatgatctggccctggtttgaacgcctggagccgtttcagctcaaggactctctcaaccacacaccgaagctgcagaggtggatggaggctatgaaggaagatccggcaatcaaggccaccatcaccgacccccagacctacaagaactacctgcagctgtacctgaagaacagccccgaggcctgcgactatggcctc

SEQ ID NO: 677 - protein, 248 aa, Artificial Sequence
  Description of Artificial Sequence: Synthetic polypeptide
MLSLLLQRSTKPELPDDGVLRFFSMAFCPFSHRVHLMLAAKQIEYHKIYIDLIEKPEWYKEFSPLGKVPAVQLTGVEDQPTLVESLIIAEYLDQQYPQTRLFPKDPLQKALDKILIERFASVVSAIYPVLTCNPNAPADAIPNFENALDVFEVELGKRGTPYFAGQLIGIVDYMIWPWFERFPSMKINTEQKYELDVKRFEKLLKWRDLMAQDEAVQKTALDVQLHAEFQKSKTIGSPQYDIAFKGKP

SEQ ID NO: 678 - DNA, 744 bp, Artificial Sequence
  Description of Artificial Sequence: Synthetic polynucleotide
atgcttagtctgctgctccagcgcagcaccaagccggagctgccagacgacggagtcctgaggttcttcagcatggctttctgtccgttctctcaccgcgtgcacctcatgctggctgccaagcagatcgagtaccataagatctacatcgacctgattgagaagcctgagtggtacaaagagttcagtccgctcggcaaggtacccgcggttcaactgactggcgtcgaagaccagcccaccctggtggaaagtctgatcatcgccgaatacctggatcagcagtacccgcaaacccgcttgttccctaaagacccgctgcaaaaggcgcttgacaagatcctaatcgagcggtttgcgagcgtcgtcagcgcgatctacccggtgttgacctgtaatccgaacgcccctgccgatgcgattcccaacttcgagaatgccctggacgtcttcgaggtcgaactaggcaagcgcggaaccccgtacttcgccggccagctaatcggcatcgtggactacatgatctggccttggttcgaacgcttcccgtccatgaagatcaacaccgagcagaagtacgagctcgacgtgaagcgcttcgagaagttgctgaagtggcgcgacctcatggcgcaagacgaggcggtacagaagaccgcactggacgttcaactgcacgcggagttccagaagtctaaaacaatcggatcgccccagtatgatatcgcgttcaagggtaagccg

SEQ ID NO: 679 - protein, 239 aa, Artificial Sequence
  Description of Artificial Sequence: Synthetic polypeptide
MAIKHLSKDSVEPPKVPGSLRFYSMRFCPYAQRVQLILNAKGMPHDTVFIDLSDKPEWYLKIFPAGKVPALIYDDKFLSESLLLADFLDKQYPEPPLQASSPLQTILDKLVIESFGKVGTAFYKLIMTTKEIEKQNFDELVASLIPIETELVERGTKFFGGNKPNMVDYMIWPWFERLDAINPYSNGTFVIPFEDKFPRLAEWKSLMIADKAVAPYYITPEKHAEHFTKRKAGLPAYDI

SEQ ID NO: 680 - DNA, 717 bp, Artificial Sequence
  Description of Artificial Sequence: Synthetic polynucleotide
atggcgatcaagcacctgagcaaggactcggtagaaccgccaaaggtaccgggcagcctgaggttctacagtatgcgattctgcccgtacgcgcagcgtgtccaactgattctgaacgcgaagggcatgccgcatgacaccgtgttcattgacctgtcagacaagccggagtggtacctgaagatctttcccgcgggtaaggtaccggccctgatctacgacgacaagttcctgtccgagagtctcctcctcgcggatttcctggataaacaatacccggagccgccactacaggcctcctcgccgctgcagaccatcctggacaagctcgtgatcgagagcttcggcaaagtcggcaccgcgttctacaagctgatcatgactaccaaggagatcgagaagcagaacttcgacgagctggtggcgagtctgatccccatcgagaccgagctggtggagcgcggtaccaagttcttcggcggcaacaagccgaacatggtggactacatgatatggccgtggttcgaacggctggacgccatcaatccgtattcaaacggcaccttcgtcatcccgttcgaggacaagttcccacgtctggcggaatggaagtctctcatgattgcggacaaggccgtggccccgtactacattacaccggagaagcacgcggagcattttaccaagcgaaaggcgggcctccctgcctacgacatc

SEQ ID NO: 681 - protein, 253 aa, Artificial Sequence
  Description of Artificial Sequence: Synthetic polypeptide
MSDTEHLTTGSTKPIFPDDGVLRLYSMRFCPYAHRVHLVLDAKNIPHHNIYINLQAKPDWFTKMSSTAKVPALEVVKEGENSVLIESLVICDYLDEMYPEVPLYPTDPLKKAQDKILIQRFGHFITSLYKMLLDDKRELDLTDLITDLEIYENELKKRGSKFFGGSKPGMLDYMIWPWCERFAALKLDDGTQAELDPQRFLTLLQWRDLMLQDKAVKIFYLDGETHDKYMNSRKAGSADYNMLYHAAKRTRRE

SEQ ID NO: 682 - DNA, 759 bp, Artificial Sequence
  Description of Artificial Sequence: Synthetic polynucleotide
atgagcgacaccgaacacctaactacgggcagtaccaaacctatattcccggacgacggcgtactccgtctgtacagcatgcgcttctgtccgtacgcgcatcgcgtccacctggtattggacgcgaagaacatcccacaccacaatatctacatcaacctccaagccaagccggactggttcactaagatgtcgtcgaccgcgaaggtcccggcgctggaggtcgtgaaggaaggggagaactcggtgcttatcgaatccctggtcatctgtgattacctcgacgagatgtatccggaagtcccgctctacccgacagaccccctgaagaaggcgcaagataagatcctgatccagcgcttcggccacttcattaccagtctctacaagatgctcctggacgacaagcgcgagttggacttgacggatctgatcaccgaccttgagatttacgagaacgagctgaagaagaggggcagtaagttcttcggtggctcgaagcccggcatgctggactacatgatctggccgtggtgtgaaagattcgccgccctcaaactcgacgatggaacccaggctgaactggacccacagcgcttcctgaccttgcttcagtggcgcgacctgatgctgcaggacaaggccgttaagatcttctacctggatggggagacccacgacaagtacatgaacagccgcaaagccggtagcgcagactacaacatgctataccacgcggccaagcggacccgccgcgag

SEQ ID NO: 683 - protein, 243 aa, Artificial Sequence
  Description of Artificial Sequence: Synthetic polypeptide
MSDTEHLTTGSTKPIFPDDGVLRLYSMRFCPYAHRVHLVLDAKNIPHHNIYINLQAKPDWFTKMSSTAKVPALEVVKEGENSVLIESLVICDYLDEMYPEVPLYPTDPLKKAQDKILVQRFGHFITSLYKMLLDDKRELDLTDLITDLEIYENELKQRGSKFFGGSKPGMLDYMIWPWCERFAALKLGDGTQAELDPQRFLTLLQWRDLMLQDKAVKIFYLDGETHDKYMNSRKAGSADYNML

SEQ ID NO: 684 - DNA, 729 bp, Artificial Sequence
  Description of Artificial Sequence: Synthetic polynucleotide
atgagcgatactgagcatctcaccactggtagcaccaagccgatctttcccgatgatggggttctgcgcctgtacagcatgcgtttctgcccgtatgcacaccgagtccacctcgtcctggacgccaagaacatcccgcaccacaacatctatatcaacctccaggctaagccggactggttcaccaaaatgtcatcgacggccaaggtacccgccttggaagtcgtcaaggaaggggagaatagcgtcctcatcgagtcgctcgttatctgcgactacctggacgaaatgtaccccgaagtgcccctgtacccaactgatccgctcaagaaagcccaagataagatcctggtccaaaggttcggccatttcatcacatcgctgtacaagatgctgttggatgacaagcgcgaactggatctgactgacctgatcaccgacttggaaatctacgagaacgagctgaagcaaagaggctcgaagtttttcgggggctctaagccgggcatgctggattatatgatctggccctggtgtgaacgcttcgcggccctgaagctgggtgatgggacccaagccgaactggacccccagcggtttctaactctcctgcagtggcgagacctgatgctgcaagacaaggcagtcaagatcttttacctggacggggagacgcatgacaagtacatgaactcgcggaaggccggctcagccgattacaatatgctt

SEQ ID NO: 685 - protein, 212 aa, Artificial Sequence
  Description of Artificial Sequence: Synthetic polypeptide
MKLYTYYRSTSSYRVRIALALKGLDYQSLPVNLVRDGGEHRQPAYLALNPQGRVPALQVDEGELLIQSPAIIEYLEERYPHPALLSSDPLRRAHERGVAALVGCDIHPLHNASVLNLLRQWGHDEEQVRQWIGHWVGQGLAAVEQLIGDQGWCFGDRPGLADVYLVPQLYAAERFGVALDAWPRIRRVADLAAAHPAFRQAHPANQPDTPAA

SEQ ID NO: 686 - DNA, 636 bp, Artificial Sequence
  Description of Artificial Sequence: Synthetic polynucleotide
atgaaactatatacctactaccgctcgacctccagctaccgcgtccgcattgccctggccctcaaggggctggactaccagtccttgccagtcaacctcgtacgcgatggcggcgagcaccgacaacccgcctatctggccttgaacccccaggggcgcgtcccggcgctgcaggtggacgaaggtgagctcctgatccagtcccccgctatcatcgagtatctggaggagcgctacccccaccccgctctgctttcgagtgacccactgcgtagagcccatgaacggggcgtcgccgccctggtcggctgcgacattcacccactgcataacgcctccgtcctcaacctgctccggcaatggggccatgacgaggagcaggtccgccagtggatcggtcattgggtaggccagggtctggcggccgtggaacagctgatcggcgaccagggatggtgtttcggcgatcgcccgggcctggccgacgtgtacttggtcccgcagctttacgccgccgagcgatttggcgttgccctggatgcctggcccagaatccgtcgcgtcgccgaccttgcagccgcacacccggccttccgccaggcgcacccggcaaaccaaccagataccccggcggcc

SEQ ID NO: 687 - protein, 212 aa, Artificial Sequence
  Description of Artificial Sequence: Synthetic polypeptide
MKLYTYYRSTSSYRVRIALALKGLDYQSLPVNLVRDGGEHRQPAYLALNPQGRVPALQVDEGELLIQSPAIIEYLEERYPHPALLSSDPLRRAHERGVAALVGCDIHPLHNASVLNLLRQWGHDEEQVRQWIGHWVGQGLAAVEQLIGDQGWCFGDRPGLADVYLIPQLYAAERFGVALDAWPRIRRVADLAAAHPAFRQAHPANQPDTPAA

SEQ ID NO: 688 - DNA, 636 bp, Artificial Sequence
  Description of Artificial Sequence: Synthetic polynucleotide
atgaaactgtatacgtattatcgcagcacgagctcgtatcgcgtccgaatagccctggcgctgaaaggtctcgactaccaaagtctcccggtgaacctggtgcgcgatgggggcgaacatcgtcaacccgcctacctcgccctaaatccacagggccgcgtcccggcgctgcaggtggacgagggcgagctgctaatccagtctcccgctatcattgagtacctggaggaacgatacccgcaccccgcgctactcagctccgacccgctcagaagggcgcacgaacgcggagtcgccgccctcgtcgggtgtgatatccacccgctccacaacgcctcagtgctgaacctgctgcgtcagtgggggcacgacgaggaacaagtccggcagtggatcggccattgggtgggtcagggcttggcagccgtggagcagctgatcggagatcagggctggtgctttggcgatagaccgggcctggccgatgtgtacttgatcccccagctgtacgcggcagaacgcttcggtgtagcgctggacgcatggccccgcattcgacgcgtcgccgacctagcggcggcgcatcccgccttccgccaggcacatcccgccaatcagccggacaccccggctgcc

SEQ ID NO: 689 - protein, 238 aa, Artificial Sequence
  Description of Artificial Sequence: Synthetic polypeptide
LLSGSVPPALVPGKIRLYSMRFCPYAQRIHLVLDAKQIPYDVVYVNLTHKPDWLIEKSPLNKVPCIELEGGETLYESLIIADYLEDAYPQNKLYPSNPLAKAKDKLLIDRFNTVISTMYKRLYSETAWEQDVFNEALAGLEFFVRELAKRETPFFGGSKPGMLDLMIWPWCERTDVIRIIKGDQFVIPRDRFLRLLEWRVAMKEDPAVSGSFLDAEVHAKYMRSCLAGTPQYDLIANS

SEQ ID NO: 690 - DNA, 714 bp, Artificial Sequence
  Description of Artificial Sequence: Synthetic polynucleotide
ctgctatctggctcggtcccgccggcgctggtgcccggaaaaatccgcctgtactcgatgcgtttctgcccttacgcccagcggattcatctagtgctggacgcgaagcagattccgtacgacgtggtgtatgttaacctcacgcataagccggactggcttatcgagaagtcaccgctgaataaggtaccctgcatcgagctcgaaggcggcgaaactctgtacgagtccctgatcatcgccgactatctggaggacgcctacccccagaataagctctacccgtcgaatccgcttgcgaaggcgaaagacaagctgctgatagaccgcttcaacaccgtcatcagtaccatgtacaagcggctctacagcgaaacggcgtgggaacaagacgtgtttaatgaggccctcgccggcctggagttcttcgtgcgtgaactggccaagcgagagaccccgttcttcggcggctcgaaacccggaatgctcgacctgatgatctggccgtggtgtgagcgaaccgacgtgatccggatcataaagggagaccaattcgtaatcccgcgcgatcgtttcctccggcttcttgagtggcgcgtggccatgaaggaagatccggctgtctcgggtagcttcctagacgcggaagtgcacgccaagtacatgcgtagttgtctggccgggaccccgcagtatgacctgatcgccaactct

SEQ ID NO: 691 - protein, 227 aa, Artificial Sequence
  Description of Artificial Sequence: Synthetic polypeptide
MPRLTLISHHLCPYVQRAAIALLEKGVAFERINIDLADKPDWFLKISPLGKVPLLRIEEEDGSEAVLFESSVICEYLEETQAGAALHPADPLIRARHRGWMEFGSSVLSDLWGYETAQDAVQLETKRKALISKFATIDGALTDGPYFAGGSFSLVDAVFAPVFRYFDLFDTLGDSRIFDGLERVRRWRKALSARESVKNAVGEDYPQRLTEFLEKHSSILLRQPAAA

SEQ ID NO: 692 - DNA, 681 bp, Artificial Sequence
  Description of Artificial Sequence: Synthetic polynucleotide
atgcctagactcactcttatcagccatcacctgtgtccgtacgtccagcgtgccgccatcgccctgctggagaaaggcgtagccttcgagaggatcaacatcgacctggcggacaagcccgactggtttctcaaaatctcgccgctgggcaaagtgccgttgctgcggatcgaggaagaagacggtagtgaggcggttctcttcgaatccagcgtgatctgcgagtacttggaggagacccaagccggcgccgctctacaccccgccgaccccctgattcgcgctagacaccgcggatggatggagttcgggtcctcggtgctcagtgatctgtggggctatgagaccgcccaagacgcggttcagctggagacgaagcggaaggcactaattagcaagttcgccacgatcgacggagcactgaccgatgggccgtatttcgctggaggctcgttcagcctagtcgacgccgtgtttgccccggtgttccgctacttcgacttgttcgacaccctgggcgacagccggatcttcgacggccttgagcgtgtgcgccggtggaggaaagccctgagtgcacgcgagtcggtgaagaatgccgtcggcgaggactacccgcaacggctgaccgagttcctggagaagcatagctccatcctgctgaggcagccggcagcagcc

SEQ ID NO: 693 - protein, 192 aa, Artificial Sequence
  Description of Artificial Sequence: Synthetic polypeptide
PKGQIRIYSMRFCPYAQRTRLVLSAKGIESETININLKEKPEWYLEKNPLGLVPTLETPSGQLVYESAITCEYLDEVYPEKKLFPSDPFAKAQQKMLLEDYSKVVPLFYKIPMTRIKGEDVSALEAELREKLSKLNKVLANKKYKFFGGDALTMIDYLIWPWFERVDAWQLKHCLDGTPELNNWILRMREDP

SEQ ID NO: 694 - DNA, 576 bp, Artificial Sequence
  Description of Artificial Sequence: Synthetic polynucleotide
ccgaaaggtcagatccgcatatactctatgcgcttctgcccgtacgcacaacgaacacgcctggtcctctctgccaagggcatcgagagcgagaccattaacatcaatctgaaggaaaagccggagtggtacctggaaaagaaccctctcggcctggtcccaacgctggaaaccccgagtggtcagctggtctacgaatcggcgatcacctgtgagtacctggacgaggtgtatccggagaagaagctgttcccgtccgacccctttgctaaggcccaacagaagatgctgttggaggactatagcaaggtcgtccccctgttctataagatcccaatgacgcgaatcaagggcgaagacgtctctgcgctggaagctgagctccgcgagaaactgtctaagctcaacaaagtcctcgccaacaagaagtacaagttctttggcggcgacgcgctcacgatgattgactacctgatctggccttggttcgaacgcgtggatgcctggcagctgaaacactgtctggacggtaccccggagctgaacaattggatactgcgcatgcgggaagatcct

SEQ ID NO: 695 - protein, 306 aa, Artificial Sequence
  Description of Artificial Sequence: Synthetic polypeptide
MYPTGGSRDRGPPSSHVKLVLTEKGKACPDGWANLQRAIAKLRRRATYFLNRLQTSEELAPLCDTMSGESARSLGKGSAPPGPVPEGLIRVYSMRFCPFAERTRLVLKAKGIRHEVININLKNKPEWFFKKNPFGLVPVLENSQGQLIYESAITCEYLDEAYPGKKLFPDDPYEKACQKMVFELFSKVPSLVGSFIRSQNKEDCAGLKEEFRKEFSKLEKVLTNKKTTFFGGSSISMIDYLIWPWFERLEAMKLNECVDHTPKLKLWMAAMKEDPTVSALLTSVKDWQGFLELYLQNSPEACDYGL

SEQ ID NO: 696 - DNA, 918 bp, Artificial Sequence
  Description of Artificial Sequence: Synthetic polynucleotide
atgtaccctaccggcgggtcacgtgaccgtggtccgccctcatcccatgtcaagctggtccttaccgagaagggtaaggcctgccctgatggctgggcgaatctgcagcgggccattgcgaagctgcgtcgcagggcgacctatttcctcaaccgcctgcagacctcggaggaactggctcccttgtgcgatactatgagtggcgaatcggccagatcactgggcaagggtagcgctcccccgggtccggtccccgaaggcctgatccgcgtctatagcatgaggttctgcccgttcgccgaacgcacccgcctggtcctgaaggctaagggtatccgtcatgaagtcatcaatatcaacctgaagaacaagcccgaatggttctttaagaagaacccgttcggccttgtgcccgtcctggaaaatagccagggccagctgatctatgagtcggcaatcacgtgtgagtatctggacgaagcgtaccccggcaagaagctgttcccggacgatccctacgagaaggcgtgtcagaagatggtcttcgagctcttcagtaaggtgccgtcgctggttgggtcgttcatccgtagccaaaacaaggaggactgcgcgggactaaaggaagagttcaggaaagagttctccaagctggaaaaggtcctcaccaacaagaagactaccttcttcggaggcagttcgatctcgatgatcgactacctgatctggccgtggttcgaaaggctggaagctatgaagctgaatgagtgcgtcgaccacacccccaagctgaaactgtggatggcagcgatgaaggaagatccgacagtatctgcgctgctgacgtccgtcaaagactggcaaggcttcctcgaactgtatctgcagaatagcccagaagcatgcgactacggcctg

SEQ ID NO: 697 - protein, 235 aa, Artificial Sequence
  Description of Artificial Sequence: Synthetic polypeptide
MPITHISKGSSRPTKPKDKLRLYNMRFCPFAERARLVLAAKGLDYECVNVNLKRKPDWFQSDPDCEGKVPALETMDGKLIPESVIICEFLEDQYPKIQFYPSDPYLKSRQKLLIQRFDRVMSSYFRLLNGTGDAEENVLQLTRHFQTYEQELFVSNTVFFGGEKPGMLDYFLWPFFGRLPTAEHEFPMNAENLPKLSAWFGGMREDPAVKQVSVSDELLRRFARNMDKEEAQLYE

SEQ ID NO: 698 - DNA, 705 bp, Artificial Sequence
  Description of Artificial Sequence: Synthetic polynucleotide
atgcctatcacgcacatctcgaagggcagtagccggcctactaagcctaaggacaagctgcgcctctacaatatgcgcttctgcccgttcgccgagagagccagactggtgctggcagccaaaggccttgactacgagtgtgtgaacgtcaacttgaagcgcaagcctgactggttccagagcgatccagactgcgaaggtaaggtacccgctctggagacgatggatggcaagctgatcccggagtcggtaatcatctgtgagttcttggaggaccaatacccgaagatacagttctatccgagcgacccttatctgaagagtcgtcagaagctgctgatccagcgcttcgatcgtgtcatgtccagctactttcgcctgctgaacgggaccggagatgccgaggaaaacgtgctgcagctgacccgccactttcaaacgtatgaacaggaactcttcgtctcaaacaccgtgttcttcgggggtgagaaaccgggcatgctggactacttcctgtggccgtttttcggcagactccctaccgccgaacatgagttcccgatgaatgcagagaatctgcccaaactcagcgcctggttcggaggcatgcgagaagacccggcggttaaacaagttagtgtatcagatgagctgctgcgtcggttcgcgcgcaacatggacaaggaagaggcccagctctatgag

SEQ ID NO: 699 - protein, 227 aa, Artificial Sequence
  Description of Artificial Sequence: Synthetic polypeptide
MSRLTLISHHLCPYVQRAAIALREKGVPFERINIDLANKPDWFLEISPLGKVPLLRIEEDDGGEAILFESSVICEYLEETQAGSALHPADPLARARHRGWMEFGSSVLSDLWGYETATEVEQLEAKRKALIAKFATLEGVLADGPYFSGSSFSLVDAVFAPIFRYFDVFERLGDSGIFAGLERVTRWRIALGERRSVKDAVGEDYPQRLMEFLDKHESILLRLPAAA

SEQ ID NO: 700 - DNA, 681 bp, Artificial Sequence
  Description of Artificial Sequence: Synthetic polynucleotide
atgtcgcggctgaccctgatctcgcaccacttgtgcccgtacgtgcagcgcgcagcgatcgccctgagagaaaaaggcgtgccgttcgagcgtatcaatatcgacctcgccaacaagccagattggttcctcgaaatatcgcccctcggcaaggtacctctgctccgcatcgaagaggatgacggcggtgaggcaatcctgtttgaatcgagcgtcatctgcgaatacctggaggagacccaggccggcagcgccttgcatccagccgaccctctggctagagcgcggcaccgcgggtggatggagttcggatcttcggtactgagcgatctgtggggatacgagacagccaccgaggtcgaacagctggaagccaagcggaaggcgctgatagcgaagttcgccacccttgaaggggtcctcgccgatggcccgtacttctctggctcgtcattctcgttggtggacgccgtcttcgcgccgatcttccggtacttcgacgttttcgagcgcttgggcgacagcggcatcttcgcgggcttggagcgcgttactcggtggcgcatcgcactcggcgaacggcgcagcgttaaggacgcagtaggcgaggactacccgcaacgactaatggagttcctggacaagcatgagtccatcttgctgcgcctgcccgccgcggcc

SEQ ID NO: 701 - protein, 249 aa, Artificial Sequence
  Description of Artificial Sequence: Synthetic polypeptide
MSGESEMTDKLILVSHPLCPYVQRAAISLTEKGVPFERIDIDLADKPDWFKAISPLGKVPLLRVQRNGDETTIFESAVILEFLEETQANPLHPADPYARARHRAWIEYGSAILNAIGRLYSAPTEAGFLAESRALTGMFDRLEAELADDALRSGPWFAGDRFSLVDAVHGPVFRYLDAFDRIGDFSILDGKPRVQAWRQALNDRPSIRHAVAPDYPQRLHAFLQAKGSFLSSLIRRNDPATALRQALPA

SEQ ID NO: 702 - DNA, 747 bp, Artificial Sequence
  Description of Artificial Sequence: Synthetic polynucleotide
atgtcaggcgaaagcgaaatgacggacaagctgatcctcgtatcgcacccgctgtgtccgtacgtccagcgcgccgccatcagccttaccgaaaagggtgttccgttcgagcggatcgacatcgacctggcggataagcccgactggttcaaggcgatctcaccgctgggcaaggtcccgctgctgagggtccagcggaatggtgacgagacaaccatcttcgagtcggccgtgatcctggagttcctggaggagacccaggctaacccgctgcatccggcggacccgtatgcccgcgcaagacaccgcgcgtggattgagtacggctccgccatactaaatgccatcggccgcctgtacagcgcccccaccgaggcgggtttcctcgcggaatcgcgagccctgaccggcatgttcgaccgcctagaagctgagctggcggatgacgcactccgaagcggaccctggttcgccggtgaccggtttagcctggtcgacgcggtccacgggccagtattcagatacctggacgcgttcgaccgcatcggcgacttcagcattttggatggcaagccgcgcgtccaagcgtggagacaggcgctgaacgaccgccccagcatcagacatgccgtggccccggactaccctcagcgcctgcacgcgttcctgcaagcgaagggcagcttcctttccagcctgatacgtcggaacgacccggcgacggcgctgcgccaggctctgcccgcg

SEQ ID NO: 703 - protein, 281 aa, Artificial Sequence
  Description of Artificial Sequence: Synthetic polypeptide
MTTIAILWFYIGMQFVMQSTKGDKTITDKLFIGLETKALKKGDARPRPLQPGQFRVYGMRFCPYTERILIYLAKKRIKAEVVHINLKEKPEWLEEIHPDKKVPALEHNGKVVVESATIPQYLDELHPATSILPKDPYERAVQRILFEQAHTFMGPLIALLRSEPEQRDEQHEILEKDLLHVESLLKDRFFGGDHASFADYLIFPIYERLVVFTDHPKAVEYNITNLVGTERFPHLTQWYKRMSLLPEVIVARPKQVELLRFLDGFIVGQPNYDIGAKEDKR

SEQ ID NO: 704 - DNA, 843 bp, Artificial Sequence
  Description of Artificial Sequence: Synthetic polynucleotide
atgactaccatcgcgatactctggttctacatcggtatgcaattcgtgatgcagtctaccaagggggacaagaccatcaccgacaagctgttcatcggcctggaaactaaggcactgaaaaagggcgacgcacgccccagaccgctgcagcccggccaattccgcgtatacggcatgcgcttttgcccgtacacggagcgcatcctcatctacctggccaagaaacgcattaaggccgaagtggtgcacatcaacctgaaggagaaaccagaatggctggaggagatccatccggacaagaaggtccccgcgctggagcacaacggcaaggttgtggtggaatctgcgacaattcctcagtacctcgacgagctgcacccggctacgtcgatcctgcctaaggacccgtacgagcgcgctgtacaacgcatcctgttcgaacaagcgcacacattcatgggcccgctgatcgctctgctgcgttccgagcctgagcagagagacgagcagcacgaaatcctggagaaggacctgctgcatgtcgaatcactgctcaaggatcgcttcttcggcggtgaccatgcgagctttgccgactatctgatctttccgatctacgagcgcctggtggtctttactgaccaccctaaggccgtcgagtataatatcaccaatctggtgggaaccgaacgtttcccccacctgacacagtggtacaagcgcatgtccctgctgccggaggttatcgtggctcgtccgaaacaggtcgaattgctgcgattcctggacggcttcatcgtggggcaacccaactacgacatcggtgccaaggaagacaagcgc

SEQ ID NO: 705 - protein, 241 aa, Artificial Sequence [sequence omitted]

SEQ ID NO: 706 - DNA, 723 bp, Artificial Sequence
  Description of Artificial Sequence: Synthetic polynucleotide
atgtccggggagtcagcccgctcactgggcaaaggctccgcaccgccgggtcccgtgcccgagggatcgattcggatctactcgatgcgcttctgtccgtttgccgaacgtacacgacttgtactcaaagcgaaggggattcgccatgaggtgataaacatcaacctgaagaacaagccggagtggtttttcaagaagaacccgttcggcctggtgccggtcttggaaaatagccaggggcagctgatctatgaatctgcgatcacctgcgagtacctggatgaagcataccctggaaagaagctgctgcccgacgacccctacgagaaggcgtgccagaagatgatcctggagctgttcagcaaggtgccaagtctggtcgggtcctttatccggagccagaataaggaagactatgcgggcctgaaggaagagtttcgcaaggagttcactaagctggaggaagtgctgaccaacaagaagaccacattcttcgggggctccagcatttccatgatcgactacctgatctggccatggttcgaacgcttggaggcgatgaaactgaacgagtgcgttgatcacacgccgaaactcaaactgtggatggccgctatgaaggaggacccaaccgtctccgcactgctaacaagcgagaaagactggcaggggttcctggagctgtacctacaaaatagcccagaggcctgcgactatggcctg

SEQ ID NO: 707 - protein, 241 aa, Artificial Sequence
  Description of Artificial Sequence: Synthetic polypeptide
MSGDATKSLGKGSPPPGPVPEGVIRLYSMRFCPFAERTRLVLKAKGIRHEIININLKNKPDWFFKKNPLGLVPVLEDSKGQVVYESVITCEYLDEVYPGKKLWPEDPYEKARQKMIFEVFTTIPPLSSSYTRKHKTEDCSGLKENLRKEFSKLEEILANKKTTFFGGSSVSMTDYLIWPWFERLEGLELTDCLDHTPKLKLWMAAMKKDPTAAALLLNVNHQRHFLELYLKNSHEACDYGL

SEQ ID NO: 708 - DNA, 723 bp, Artificial Sequence
  Description of Artificial Sequence: Synthetic polynucleotide
atgagtggcgacgcgacgaagagcctgggcaaaggttcgcctccgccgggccctgttccagaaggcgtgattcggctttactcgatgcggttttgtcccttcgctgaacgcacgcgcttggtgctcaaagccaagggtatccgccatgaaatcatcaacatcaacctgaaaaataagcccgactggttcttcaagaagaatccgctgggcctggtgccggtcctggaggactccaagggccaagttgtctacgaatctgtcatcacttgcgaatacttggacgaggtctaccctggtaagaagctgtggccggaggacccgtatgagaaggcgcgccaaaagatgatattcgaggtcttcacaaccatcccgccgctgagttcgagctatacccgtaagcataagacggaggactgcagcggcctaaaggagaacctgcgtaaggagttcagtaagctcgaagagatactggcgaacaagaagaccaccttcttcgggggtagctcagtctccatgactgactacctgatttggccctggtttgagcgcctcgaaggtctcgaactgactgactgcttggaccacactccgaagttgaagctgtggatggcagccatgaagaaggacccgaccgccgctgctctgctgctgaacgtgaaccatcagcggcacttcctggagctgtacctgaagaactcccacgaagcgtgtgactacggcctc

SEQ ID NO: 709 - protein, 240 aa, Artificial Sequence
  Description of Artificial Sequence: Synthetic polypeptide
MSGESARSLGKGSAPPGPVPEGSIRIYSMRFCPFAERTRLVLKAKGIRHEVININLKNKPEWFFKKNPFGLVPVLENSQGQLIYESAITCEYLDEAYPGKKLLPDDPYEKACQKMILELFSKVPSLVGSFIRSQNKEDYAGLKEEFRKEFTKLEVLTNKKTTFFGGNSISMIDYLIWPWFERLEAMKLNECVDHTPKLKLWMAAMKEDPTVSALLTSEKDWQGFLELYLQNSPEACDYGL

SEQ ID NO: 710 - DNA, 720 bp, Artificial Sequence
  Description of Artificial Sequence: Synthetic polynucleotide
atgagtggtgaatccgctagatcgctggggaagggctctgcaccgccaggccccgtgccagaaggcagcattcggatctactcgatgcgattctgcccgtttgctgagcgaacccgcctggttctcaaggcgaagggaatccgccatgaggtaatcaatatcaacctgaagaacaagcccgagtggttcttcaagaagaacccgttcggcctcgtacccgtcctggagaactcgcagggccaactaatttacgagtcggcgatcacgtgcgagtatcttgatgaggcgtacccggggaaaaagctgctgcccgacgacccatacgagaaggcatgccagaagatgatcctggagctgttctccaaggttccgtcgctggttggctcgttcatacgctctcagaataaggaggactatgcagggctgaaggaggaatttcgtaaggagttcactaaactggaagtcctgaccaacaagaagacgaccttcttcgggggtaattccattagcatgatcgactacctgatatggccttggttcgagcgcctggaggcgatgaaattgaacgaatgcgtcgatcacaccccgaagctcaagctgtggatggccgccatgaaggaggacccaactgtgtctgccctgcttacctctgagaaggactggcaaggcttcctggagttgtacctccagaactcaccggaagcatgcgattacgggcta

SEQ ID NO: 711 - protein, 241 aa, Artificial Sequence
  Description of Artificial Sequence: Synthetic polypeptide
MSRESARSLGKGSAPPGPVPEGSIRVYSMRFCPFAERTLLVLKAKGIRHEVININLKNKPEWFFKKNPFGLVPVLENSQGQLIYESPITCEYLDEAYPGKKLLPDDPYEKACQKMILELFSKVPSLVGSFIRSQNKEDYAGLKEEFRKEFTKLEEVLTNKKTTFFGGNSISMIDYLIWPWFERLEAMKLYECVDHTPKLKLWMAAMKEDPTVSALLISGKDWQGFLELYLQNSPEACDYGL

SEQ ID NO: 712 - DNA, 723 bp, Artificial Sequence
  Description of Artificial Sequence: Synthetic polynucleotide
atgagccgcgaaagcgctcgctccctgggtaaagggagtgcccctcctggacccgttccggagggctcgatccgtgtgtactctatgcgtttctgcccgttcgccgaaagaacgctgctcgtgctgaaggccaaaggaatacgtcatgaggttatcaatatcaacctcaagaataagccggaatggttcttcaagaagaacccgttcggtttggtgccggttctggagaactcgcagggccagctgatctatgagagcccaattacctgcgaatacctggacgaggcttaccctggaaagaagttgctgcccgatgacccgtacgagaaggcgtgtcagaagatgatcctggagctgttctcgaaggtcccgtccctggtgggcagcttcatccgttcccagaacaaggaagactatgccggtctcaaggaagagttcagaaaggagttcaccaagctggaagaggtgctgaccaacaagaagacgacattcttcggtggcaacagcatctcgatgatcgattacctgatatggccgtggttcgagcgcctagaagcgatgaagctctatgaatgcgtggaccacaccccgaagctgaagttgtggatggcagcgatgaaggaagacccgactgtctccgcgctgctcatcagcggtaaagactggcagggcttccttgaactgtacctgcaaaactcccccgaagcctgcgattatggcctc

SEQ ID NO: 713 - protein, 241 aa, Artificial Sequence
  Description of Artificial Sequence: Synthetic polypeptide
MSGASARSLGKGSAPPGPVPEGQIRVYSMRFCPFAQRTLMVLKAKGIRHEIININLKNKPEWFFEKNPFGLVPVLENTQGHLITESVITCEYLDEAYPEKKLFPDDPYEKACQKMTFELFSKVPSLVTSFIRAKRKEDHPGIKEELKKEFSKLEEAMAKKRTAFFGGNSLSMIDYLIWPWFQRLEALELNECIDHTPKLKLWMATMQEDPVASSHFIDAKTYRDYLSLYLQDSPEACDYGL

SEQ ID NO: 714 - DNA, 723 bp, Artificial Sequence
  Description of Artificial Sequence: Synthetic polynucleotide
atgtcgggcgcatcggcccgcagtctcggaaaaggttccgcgccacccggtccagttccggaaggtcagatccgtgtctactcaatgagattttgcccgttcgcccagcgcaccctcatggttcttaaggcgaagggtattcgacacgagatcattaacatcaacctgaagaataagccggagtggttcttcgagaagaacccattcggcctggtccccgtgctggaaaacactcagggtcacctgataaccgagagtgtgatcacctgcgagtatctggacgaggcctacccggagaagaagctctttccggacgacccgtatgagaaggcctgccagaagatgaccttcgagctgttcagtaaggtaccctcactcgtcacctcgttcatccgagccaaaagaaaggaagatcacccgggtataaaggaagagctgaagaaggagttctcgaaattggaagaggcgatggccaaaaagagaacggccttcttcggtggcaactctttgtccatgatcgattacctcatttggccttggtttcagcgcttggaagcgctggaattgaacgaatgcatcgatcacacccccaagctgaaactgtggatggcgacaatgcaagaagacccggtggcgagcagccatttcatcgacgccaagacttaccgcgactatctttcgttgtatctccaggacagcccggaagcctgcgattatggactg

SEQ ID NO: 715 - protein, 241 aa, Artificial Sequence
  Description of Artificial Sequence: Synthetic polypeptide
MSAGSARTLAKGSAPPGPVPEGLIRVYSMRFCPFAQRTLLVLKAKGIRHEIININLKNKPEWFFKKNPFGLVPVLENSQGQLIYESPITCEYLDEAYPGKKLLPDDPYEKACQKMVFELFSKVPSLVTGFLRRQNKEDGSGLKEELRKEFSKLEEVLTNKKTTFFGGNSLSMIDYLIWPWFERLEALELNDCVDHTPKLKLWMAAMREDPAVSALLNEANTLRGFLNLYLQNSPEACDYGL

SEQ ID NO: 716 - DNA, 723 bp, Artificial Sequence
  Description of Artificial Sequence: Synthetic polynucleotide
atgtcagcaggctctgcccgaaccctggccaagggatcggctccccctggccccgtacccgagggcctgatcagggtttacagtatgcgcttctgcccgttcgcgcagagaactttgctggtgctgaaggcgaagggcatccgccatgagattatcaacatcaacctgaagaacaagcccgaatggttcttcaagaagaacccgttcggcctcgtcccagtcctggagaactctcagggccagttgatctacgaatcgccgatcacctgcgagtacctggacgaggcttatccagggaagaagctgctcccagacgacccgtatgagaaagcctgccaaaagatggtgttcgaactgttctcgaaggtaccgagcttggttaccggattcttgcgccgtcagaacaaagaggatggcagcggactgaaggaggagctccggaaggagttctcgaagctggaggaagtgttgaccaacaagaagaccaccttctttgggggaaattccctcagcatgatcgactatctgatctggccctggttcgagcgactagaggcgcttgagctgaacgattgtgtggaccatacccccaagttgaagctctggatggccgctatgcgtgaggacccggcggtgtcggcgctgctcaacgaggccaacacgttgcggggcttcctgaatctgtacctgcagaatagcccggaagcctgcgactatggcctc

SEQ ID NO: 717 - protein, 241 aa, Artificial Sequence
  Description of Artificial Sequence: Synthetic polypeptide
MSGESARSLGKGSAPPGPVPEGSIRIYSMRFCPFAERTRLVLKAKGIRHEVININLKNKPEWFFKKNPFGLVPVLENSQGQLIYESAITCEYLDEAYPGKKLLPDDPYEKACQKMILELFSKVPSLVGSFIRSQNKEDYAGLKEEFRKEFTKLEEVLTNKKTTFFGGNSISMIDYLIWPWFERLEAMKLNECVDHTPKLKLWMAAMKEDPTVSALLTSEKDWQGFLELYLQNSPEACDYGL

SEQ ID NO: 718 - DNA, 723 bp, Artificial Sequence
  Description of Artificial Sequence: Synthetic polynucleotide
atgagcggcgagtcagcccgaagcctgggcaaaggatctgcacctcccgggcccgtgcccgagggatctatccgcatatactcgatgcggttctgcccgtttgcagagaggaccaggctcgtactgaaggctaaaggtattcgccatgaagtcatcaacattaacctgaagaacaagcccgagtggttcttcaagaagaacccgttcggcctggtacccgtgctagagaactcgcaaggccagctcatatacgaaagcgcgatcacctgcgagtacctggacgaggcctacccagggaagaagctgctgcccgatgacccgtacgaaaaagcctgtcagaagatgatcctagaactcttcagcaaggtgccgagcctagttgggtcgttcatccgctcgcagaacaaggaggactacgccggcctgaaggaggagttcaggaaggagttcaccaagttggaagaggtgctgacaaacaagaagaccaccttcttcggcggtaacagcatctcaatgatcgactacctgatctggccgtggttcgaaagactggaagcgatgaagttgaacgaatgcgtcgaccatacgccgaagctgaagctgtggatggcggcgatgaaggaggaccctactgtgtccgcgctgttgacgagcgaaaaggactggcaaggcttcttggagctgtatctgcagaactccccagaagcctgtgactacggtttg

SEQ ID NO: 719 - protein, 241 aa, Artificial Sequence
  Description of Artificial Sequence: Synthetic polypeptide
MSGESARSLGKGSAPPGPVPEGLIRVYSMRFCPFVERTRLVLKAKGIRHEVININLKNKPEWFFKKNPFGLVPVLENSQGQLIYESAITCEYLDEAYPGKKLFPDDPYEKACQKMVFELFSKVPSLVGSFIRSQNKEDCAGLKEEFRKEFSKLEKVLTNKKTTFFGGSSISMIDYLIWPWFERLEAMKLNECVDHTPKLKLWMAAMKEDPTVSALLTSVKDWQGFLELYLQNSPEACDYGL

SEQ ID NO: 720 - DNA, 723 bp, Artificial Sequence
  Description of Artificial Sequence: Synthetic polynucleotide
atgagcggcgagagtgctagatctctcggcaagggcagtgcaccgccaggcccggtgccggaaggcctcattcgtgtatatagcatgcgattttgtccgttcgttgagcgcacccgcctcgtcctgaaggccaagggaatccgacatgaagtgatcaacatcaacctgaagaacaagccagagtggttcttcaagaagaacccgttcggtctggttccggtcctcgaaaactcgcagggccagctaatctacgagtcggccatcacctgcgagtacctggacgaagcgtaccccggaaagaagctgttcccagacgatccttacgagaaggcgtgccagaagatggtcttcgaactgttcagcaaggtgccgagcctcgtaggctcgttcatccggagccagaacaaggaagattgcgcagggctgaaggaggagttccgtaaggagttctccaagctagagaaggtcctgactaacaagaaaaccaccttcttcggcggctccagcatttcgatgatcgattacctcatctggccgtggttcgagcgtctggaggcgatgaagctgaacgaatgtgtggatcatactccgaagctcaagctatggatggctgccatgaaggaagaccctactgtgagcgccctgcttacctccgttaaggactggcagggttttcttgagttgtaccttcaaaacagcccggaggcctgcgactacggcctg

SEQ ID NO: 721 - protein, 208 aa, Artificial Sequence
  Description of Artificial Sequence: Synthetic polypeptide
MSGDSSLSLGKGSLAPGPVPEGIIRLYSMRYCPFAQRTRLVLKAKGIKHEIVNINLKNKPDWFFEKNPGGLVPVLETSKGQLIYESSITCEYLDEAYPENKLYPTDPYEKAFQKMTLELFSTILVNRNTTFFGGNSVSMIDYLIWPWFERLELFQLQDCLDHLPKLKEWVEVMMLDPAVQATTSDLQKIKGFFDLYLKNSHEACDYGL

SEQ ID NO: 722 - DNA, 624 bp, Artificial Sequence
  Description of Artificial Sequence: Synthetic polynucleotide
atgtctggagacagctccctgtcactgggcaagggatcgttggctccgggccctgtcccggaaggtattatcaggctctactccatgcgatactgtccattcgcacagcgaaccagactggtcctgaaggctaaaggtatcaagcatgagatcgtgaatatcaacctgaagaataaacccgactggttcttcgagaagaaccctggcggcctggtaccggtgctggaaaccagcaaggggcaactgatctacgagtctagcatcacgtgcgaatatctggacgaggcataccccgaaaacaagctgtaccctaccgatccgtacgagaaggcctttcagaagatgaccctggaactcttctctacgatcctggtcaaccgtaacaccacgtttttcggcggcaattcggtcagcatgatagactacctcatttggccgtggtttgaaaggctggaactcttccaactgcaggattgcctggatcatcttccgaagctgaaggaatgggtggaagtgatgatgctcgatccggcggttcaagccaccacatcggatttgcagaagatcaaaggcttcttcgatctatacctgaaaaacagtcacgaagcctgcgactacggcctg

SEQ ID NO: 723 - protein, 274 aa, Artificial Sequence
  Description of Artificial Sequence: Synthetic polypeptide
MEEEEEEEDEEGKGREEVRGGKIGEKNKPSNTRLCAIYHGSVLPPLVPGKIRLYSMRFCPYAQRIHLVLDAKQIPYDIVYVNLTHKPDWLIEKSPLNKVPCIELEGGETLYESLIIADYLDDVYPQNKLYPSNPLAKAKDKLLIDRFNAVITTIYKVFYLGPTLEQDVFNEALNGLELFDQELAKRGSPFFGGSKPGMLDFMIWPWCERADVIRIIRGEQFVIPRERFLRLLEWRNAMKEDPAVRGSFLDRKKTLQYVAAFWMLKHTPSTYVVV

SEQ ID NO: 724 - DNA, 822 bp, Artificial Sequence
  Description of Artificial Sequence: Synthetic polynucleotide
atggaggaagaggaagaagaagaagacgaggagggcaagggcagagaagaggtgcgcggaggcaagatcggcgaaaagaacaagcccagtaacacccggctctgtgcaatttaccacggttcggtcctgccaccgctggtgccaggcaagatacgcctgtactccatgcgcttctgcccctatgcccaacgcatccatctggtcctggatgctaagcaaatcccatacgacatcgtgtacgtgaatctcacccataagccggactggctcatcgagaagtcgccgctgaataaggtcccgtgcatagaactcgaaggtggcgagaccctgtatgagtctctcatcatcgccgactacctggacgacgtctacccgcagaacaagctctacccgtcgaacccgctcgcgaaggcaaaggataagctgttgatcgaccggttcaacgcggtcatcaccaccatctacaaggtgttctatctgggtccgacgctggagcaggacgtattcaacgaggccctaaacggtctggagctgtttgaccaagaacttgctaagcgaggcagccctttctttggcggctctaagccgggtatgctcgactttatgatctggccatggtgtgagagggccgacgtgatccgcattatccgcggcgaacaattcgtcatcccgcgcgaacgcttcttgcgcctgctggagtggcgaaacgcgatgaaggaagaccctgccgttcggggcagcttcctcgaccgcaaaaagacgctccagtacgttgcggccttctggatgctcaagcatacgccgtctacctacgtcgtggta

SEQ ID NO: 725 - protein, 241 aa, Artificial Sequence
  Description of Artificial Sequence: Synthetic polypeptide
MSGESARSLGKGSAPPGPVPEGSIRVYSMRFCPFAERTRLVLKAKGIRHEVININLKNKPEWFFKKNPFGLVPVLENSQGQLIYESAITCEYLDEAYPGKKLLPDDPYEKACQKMILELFSKVPSLVGSFIRSQNKEDYAGLKEEFRKEFTKLEEVLTNKTTTFFGGNSISMIDYLIWPWFERLEAMKLNECVDHTPKLKLWMAAMKEDPTVSALLTSEKDWQGFLELYLQNSPEACDYGL

SEQ ID NO: 726 - DNA, 723 bp, Artificial Sequence
  Description of Artificial Sequence: Synthetic polynucleotide
atgagcggggagtcggcccgttcgctgggcaagggctcggctccgcccggcccggtgcctgagggttctatccgcgtatatagcatgcgattttgcccgttcgcagaacgtacccggttggtcctgaaggcgaaggggattcgccacgaggtcattaacatcaatctgaagaacaagcccgagtggttctttaaaaagaacccttttggcctggtcccggtgcttgagaactcgcaaggccagctgatatacgagagcgccatcacgtgcgaatacctggacgaggcttatcccgggaagaaactgctgccggatgacccgtatgagaaggcttgccaaaagatgatcctggagctgttctcgaaggtgccttcactcgtaggctcctttatccgcagccagaacaaggaggactatgccggcttgaaggaggagttccggaaggagttcaccaagttggaggaggtacttaccaataagaccaccaccttcttcggcggcaactcgatcagcatgatcgactacctcatctggccgtggttcgaaagactggaggccatgaagctgaacgagtgcgtcgaccataccccgaagctgaaattgtggatggccgcgatgaaggaggaccctacagttagcgctctcctcacctctgaaaaggactggcaggggttcctggagctgtacttgcaaaacagccctgaggcttgcgattacggattg

SEQ ID NO: 727 - protein, 290 aa, Artificial Sequence
  Description of Artificial Sequence: Synthetic polypeptide
DNGWSWRPPGAGTFELRRKRGREGGREGRATYFLNPLQTPEELGLRCATMSGESARSLGKGSAPPGPVPEGSIRIYSMRFCPFAERTRLVLKAKGIRHEVININLKNKPEWFFKKNPFGLVPVLENSQGQLIYESAITCEYLDEAYPGKKLLPDDPYEKACQKMILELFSKVPSLVGSFIRSQNKEDYAGLKEEFRKEFTKLEEVLTNKKTTFFGGNSISMIDYLIWPWFERLEAMKLNECVDHTPKLKLWMAAMKEDPTVSALLTSEKDWQGFLELYLQNSPEACDYGL

SEQ ID NO: 728 - DNA, 870 bp, Artificial Sequence
  Description of Artificial Sequence: Synthetic polynucleotide
gacaacggttggagctggcggcccccgggagcaggaaccttcgagctgcgacgcaagcgtggccgtgaaggcggaagggagggacgcgctacctacttcctcaaccccctccaaaccccggaagaactcggattgaggtgcgccacgatgtcaggcgaatcggctcgctcgctgggcaaaggctcggcgccaccggggccggtacccgaaggctcgattcgcatatactcgatgcgcttctgtcctttcgccgaacgcacacgcctggtgttgaaggcgaagggcatccgccatgaggtcataaacatcaatctgaagaacaagcccgaatggttctttaagaaaaatccattcgggctagtcccagtgctggagaactcccagggtcagctgatctacgaatcggctatcacttgcgagtacctggacgaagcatacccgggaaagaaattgctgcccgacgacccgtatgagaaggcatgccagaagatgattctggagcttttctcgaaggtgccgtccctcgtcggctcgtttatccgctcacagaacaaggaggattacgccggcctgaaagaggagttccgcaaggagttcacaaagctcgaagaagtcctgacaaataagaagaccaccttcttcgggggcaactccatctccatgatcgactacctcatctggccgtggtttgagaggttggaagcgatgaagctgaacgagtgcgtcgaccataccccgaagttgaagctatggatggccgcgatgaaagaagacccgaccgtgtccgctctcctgacctccgagaaggactggcagggcttcctcgaactgtatctccagaatagcccggaagcctgtgactacggcctc

SEQ ID NO: 729 - protein, 241 aa, Artificial Sequence [sequence omitted]

SEQ ID NO: 730 - DNA, 723 bp, Artificial Sequence
  Description of Artificial Sequence: Synthetic polynucleotide
atgagcggcgagtcagcccgatccctgggcaaaggctcagctccaccaggaccggtcccggaagggagcatcaggatttactcgatgcgcttctgccctttcgctgagcgcacgcggctggttctgaaggcgaaaggtatccgccacgaggtgatcaacatcaacctcaaaaacaagcctgagtggttcttcaagaagaatccgttcggcttggtacccgtcctggaaaacagccaaggccagctcatttacgagagcgcgataacctgcgagtacctcgacgaagcgtacccgggcaagaagctgctgcccgacgatccgtacgagaaggcctgtcagaagatgatactggaactgttcagtaaggtgcccagtctggtgggttccttcatccgcagccagaacaaggaagactacgatgggctcaaggaagagttccgcaaggagttcacaaagctggaggaggtcctcacgaacaagaagaccacgttcttcggcgggaactcgatcagcatgatcgactacttgatctggccttggttcgaaagactggaagccatgaagctcaacgaatgcgtagaccatacgccgaaactgaagctgtggatggccgcgatgaaggaggacccgaccgtgtccgccctgttgacatctgagaaagattggcagggcttcctggagctctatctccagaactctccggaagcatgcgactacggactg

SEQ ID NO: 731 - protein, 229 aa, Artificial Sequence
  Description of Artificial Sequence: Synthetic polypeptide
MKFCPYAQRVHLVLDAKNIPYHVAYINLTEKPDWFEKVSALTKVPALEIPGHGENLIESLIIADYLDEKYHQNSLHSKDPLQKARDRILVERFESFISPFYRIIFQRNQGGAPGAITELTSALDLYEKELRERKTKFFGGSKPGMLDYMIWPWCERSDSLKFILGDKYELDKVRFSELIKWKEEMQKDKAVKENYISPEDHFKYASLRLAGTPDYDFLAVIPLKKSRLS

SEQ ID NO: 732 - DNA, 687 bp, Artificial Sequence
  Description of Artificial Sequence: Synthetic polynucleotide
atgaagttctgtccgtacgcccagcgagtgcatttggtcctggatgctaagaacatcccgtaccacgtcgcctacattaatctgactgagaagccggactggttcgaaaaggtgtcggcacttacgaaggtaccggccctggaaatccccggtcatggcgagaaccttattgagtctctgatcatcgcggattaccttgatgagaagtaccatcagaactctctgcacagcaaggaccccctgcaaaaggcgagagaccgcatcctagttgagcgtttcgagtccttcatttcgccgttctatcgcatcatcttccagaggaaccagggcggcgctccgggcgccatcaccgagctaacgtcagccctggacctgtatgagaaggaattgcgcgaacgaaagaccaagttcttcggcggttcgaaaccgggcatgctagactacatgatctggccctggtgtgagcgctctgatagcctcaaattcatcctcggcgacaagtatgagctggacaaggttcgtttctccgagctgatcaagtggaaggaggagatgcagaaggacaaggccgtgaaggagaactacatctcgccggaagaccacttcaagtatgcaagcctgcgcctcgctggcacgccggattatgacttcctcgccgtaatcccgctgaagaagagtaggctctcc

SEQ ID NO: 733 - protein, 241 aa, Artificial Sequence
  Description of Artificial Sequence: Synthetic polypeptide
MSGASARSLGKGSAPPGPVPEGQIRVYSMRFCPFAQRTLMVLKAKGIRHEIININLKNKPEWFFEKNPFGLVPVLENTQGHLITESVITCEYLDEAYPEKKLFPDDPYEKACQKMTFELFSKVPSLVTSFIRAKRKEDHPGIKEELKKEFSKLEEAMANKRTAFFGGNSLSMIDYLIWPWFQRLEALELNECIDHTPKLKLWMATMQEDPVASSHFIDAKTYRDYLSLYLQDSPEACDYGL

SEQ ID NO: 734 - DNA, 723 bp, Artificial Sequence
  Description of Artificial Sequence: Synthetic polynucleotide
atgtccggtgccagcgcgcgtagcctgggcaaaggtagcgccccgcccgggccggtgcccgaggggcagatccgcgtctattcgatgcgcttctgtccgttcgcccaacgcaccctcatggtgctgaaggccaagggtatccgccacgaaatcatcaacatcaacctgaagaacaagcccgagtggttcttcgagaagaacccgttcggcctcgtccccgtgctggagaacacgcaaggccatctgatcacggagtccgtcatcacgtgcgagtacctcgatgaagcgtatccggaaaagaagctgttccccgacgacccgtacgagaaagcgtgccagaagatgaccttcgagctcttcagcaaagtgccgtcgctggtgaccagcttcatccgcgcgaagcgcaaggaggatcaccccggtatcaaggaggagctcaagaaggagttctcgaagctggaagaggccatggccaataagcgcacggccttcttcggcggcaactcgctgagcatgatcgactatctgatctggccgtggttccaacgcctcgaagccctggaactgaacgaatgcatcgaccataccccgaagctcaagctctggatggccaccatgcaggaagatccggtggcgtccagccatttcatcgacgcgaagacctaccgcgactacctgtcgctctatctgcaagacagcccggaagcgtgcgactacgggctc

SEQ ID NO: 735 - protein, 252 aa, Artificial Sequence
  Description of Artificial Sequence: Synthetic polypeptide
MSNLQHFTLGSSKPLFPDDGILRLYSMRFCPYAHRVHLVLDAKNVPHHDIYINLKEKPEWFREVSSSGKVPALELVREPGHPVLIESLIICDYLDEKYPEVPLYPKDALKKAQDQILIERFGQFIMTFYRILLNPNPADLVNDDIFAGLAIYEEELKQRGTEFFGGTAPGMLDYMIWPWCERFAALKYDRGLELDPERFVTLLKWRDLMLQDRAVKIFHLDGETHAKYMKSRRDGNPDYNMLYKETKRPKLE

SEQ ID NO: 736 - DNA, 756 bp, Artificial Sequence
  Description of Artificial Sequence: Synthetic polynucleotide
atgtcgaacctccagcacttcacgctgggcagcagcaaaccgctgttccccgacgacggcatcctgcggctctacagcatgcgcttctgcccctacgcccaccgtgtccatctggtcctggacgccaagaacgtcccgcaccacgacatctacatcaacctgaaagagaagccggaatggttccgcgaggtgtcctcgtcgggtaaggtgccggcgctggaactggtgcgtgagccggggcatccggtgctcatcgaatcgctcatcatctgcgattatctggacgaaaagtacccggaggtccccctctatcccaaggatgcgctgaagaaagcccaggaccaaatcctgatcgaacgcttcggccagttcatcatgaccttctaccgcatcctgctgaacccgaatccggcggacctggtgaacgacgatatcttcgcgggtctcgccatctacgaagaggagctcaaacagcgcggcacggagttcttcggtggtaccgcgccggggatgctggactacatgatctggccctggtgtgagcgcttcgcggccctcaagtacgatcgtggcctggaactggaccccgaacggttcgtcacgctcctcaagtggcgcgacctgatgctgcaggatcgcgcggtcaagatcttccatctggacggcgagacccacgcgaagtacatgaagtcccgccgcgacggcaatcccgactataacatgctgtacaaggagacgaagcgccccaagctggaa

SEQ ID NO: 737 - protein, 285 aa, Artificial Sequence
  Description of Artificial Sequence: Synthetic polypeptide
MTSIKQNHGEGLVLSEQEVEQYLHKGITYFGNRVCPFAHRAWWTANETGFADRMTYVHIELMDNKPAWYQAKVNPSGTVPMLVVDGVPIFESLIVANYMNNAAGGSLWPTDPLKKSHVEAIIAKFDSKCTGALYQVVRNRDPSKDAELKASLKSAYEDLEALYTQFKADPAKPYLMGDDLSMAEIAMMPFLDRMVPTLEHYRSFNLFREAQIPNLQRAYEVASARPAFVKTRFPDAVKLMNVYANGVRAAPLPPTLIQRAAQRAPMLIAGGLVGAAAAFALLRAR

SEQ ID NO: 738 - DNA, 855 bp, Artificial Sequence
  Description of Artificial Sequence: Synthetic polynucleotide
atgacctccatcaagcagaaccatggcgagggcctggtcctgagcgaacaggaggtcgagcagtacctgcacaagggcatcacctacttcggcaaccgcgtgtgcccgttcgcgcatcgggcctggtggaccgccaacgaaaccggcttcgcggatcgcatgacgtacgtccacatcgaactgatggacaacaagccggcctggtaccaagccaaggtgaacccgagcggtaccgtccccatgctggtggtggacggcgtcccgatcttcgaatcgctcatcgtggcgaactacatgaacaacgccgcgggcggctcgctgtggccgacggacccgctgaagaagtcgcacgtggaagccatcatcgcgaagttcgatagcaagtgtaccggcgcgctgtaccaggtggtccgtaaccgcgaccccagcaaggatgcggagctcaaagccagcctcaagtcggcctatgaagacctggaggcgctgtacacccagttcaaggccgacccggccaagccgtacctcatgggcgacgacctctccatggccgagatcgccatgatgccgttcctggatcgcatggtgccgacgctggaacactaccggtcgttcaacctcttccgcgaggcgcagatccccaacctgcagcgtgcgtacgaagtggccagcgcgcgtcccgccttcgtcaagacccgcttcccggatgccgtcaaactcatgaacgtctacgccaatggcgtccgtgccgcgcccctcccgccgacgctgatccaacgcgccgcccagcgcgcccccatgctcatcgccggtggtctcgtgggcgccgccgcggccttcgccctcctccgtgcccgt

SEQ ID NO: 739 - protein, 241 aa, Artificial Sequence
  Description of Artificial Sequence: Synthetic polypeptide
MSGESARSLGKGSAPPGPVPEGSIRVYSMRFCPFAERTLLVLKAKGIRHEVININLKNKPEWFFKKNPFGLVPVLENSQGQLIYESAITCEYLDEAYPGKKLLPDDPYEKACQKMILELFSKVPSLVGSFIRSQNKEDYAGLKEEFRKEFTKLEEVLTNKKTTFFGGSSISMIDYLIWPWFERLEAMKLNECVGHTPKLKLWMAAMKEDPTVSALLTSEKDWQGFLELYLQNSPEACDYGL

SEQ ID NO: 740 - DNA, 723 bp, Artificial Sequence
  Description of Artificial Sequence: Synthetic polynucleotide
atgtccggggaaagcgcgcggagcctgggcaagggctcggccccgccgggccccgtccccgaaggctcgatccgggtctattccatgcgtttctgccccttcgccgaacgcaccctgctggtgctgaaggcgaagggcatccgccatgaggtcatcaacatcaacctcaagaacaagccggagtggttcttcaagaagaatccgttcggcctggtcccggtgctggagaacagccaaggccagctgatctacgagtccgccatcacgtgcgaatacctcgatgaggcctacccggggaagaagctgctcccggacgacccgtatgagaaggcgtgccagaagatgatcctggagctgttcagcaaagtcccctccctcgtgggctccttcatccgctcccagaacaaagaggactacgccggcctgaaggaggagttccgcaaggagttcacgaagctggaggaagtcctgaccaacaagaagacgaccttcttcggcggcagctccatctccatgatcgactacctgatctggccgtggttcgagcggctcgaagccatgaaactgaacgaatgcgtgggccatacgccgaaactgaagctctggatggccgccatgaaggaagatccgaccgtctcggcgctcctcacctccgagaaggactggcagggcttcctggagctgtacctgcagaacagccccgaagcctgtgattatggcctg

SEQ ID NO: 741 - protein, 241 aa, Artificial Sequence
  Description of Artificial Sequence: Synthetic polypeptide
MSGESARSLGKGSAPPEPVPEGSIRVYSMRFCPFAERTRLVLKAKGIRHEVININLKNKPEWFFKKNPFGLVPVLENSQGQLIYESAITCEYLDEAYPGKKLLPDDPYEKACQKMILELFSKVPSLVGSFIRRQNKEDYAGLKEEFRKEFTKLEEVLTNKKTTFFGGNSISMIDYLIWPWFERLEAMKLNECVDHTPKLKLWMAAMKEDPTVSALLTSEKDWQGFLELYLQNSPEACDYGL

SEQ ID NO: 742 - DNA, 723 bp, Artificial Sequence
  Description of Artificial Sequence: Synthetic polynucleotide
atgagcggtgagtccgcccgctccctgggcaaggggtcggcgcccccggaaccggtcccggagggttccatccgggtgtacagcatgcgtttctgtccgttcgccgaacgcacccgtctcgtcctcaaggcgaagggcatccgccacgaagtcatcaacatcaacctgaagaacaagcccgaatggttcttcaagaagaaccccttcggcctcgtgccggtcctcgaaaactcgcaaggccaactcatctacgaatccgccatcacctgtgaatacctcgacgaggcctatccgggcaagaagctgctgccggacgacccgtacgaaaaggcctgccagaaaatgatcctggaactgttctccaaggtcccctccctcgtcggcagcttcatccgccggcagaacaaggaagactatgccgggctcaaggaagagttccgcaaggagttcacgaagctggaggaggtcctgaccaacaagaagaccacgttcttcggcggcaatagcatcagcatgatcgactacctgatctggccgtggttcgaacgcctggaagccatgaagctgaatgaatgtgtcgaccacacgccgaagctcaagctctggatggccgccatgaaggaagacccgaccgtgtcggccctgctgacctcggaaaaagactggcagggcttcctcgaactctacctgcagaacagccccgaagcgtgcgattatggcctg

SEQ ID NO: 743 - protein, 223 aa, Artificial Sequence
  Description of Artificial Sequence: Synthetic polypeptide
MSNIQLYFAKASTFSQRTRVALLEKGIDFTPIEIDLQNKPDGYIQISRYGKVPAIQHGDVIIYESAIINEYLEEAFPEPPLLPHDPANKAIARIWIDYANTRLVPAFNKFLRGKDHQEQEQGRKEFTEALLYLEQEGLSKGDYFLGNQFSLVDISFYPWFERLPLLEHFRKFTLPAETTHLQTWWDLVRDRSSIQAVANPVDFYLQRFAKIIGEPVAIGAGQK

SEQ ID NO: 744 - DNA, 669 bp, Artificial Sequence
  Description of Artificial Sequence: Synthetic polynucleotide
atgagcaatatccaactgtacttcgccaaagcctccaccttctcgcagcggacccgcgtcgccctgctggaaaagggcatcgatttcaccccgatcgaaatcgacctccagaacaagccggacggctacatccagatctcccgctatggtaaggtgccggcgatccagcacggcgacgtgatcatctacgaatccgccatcatcaacgaatacctggaagaagcgttccccgagcccccgctgctgccgcatgatccggcgaataaggcgatcgcgcgcatctggatcgactacgccaacacgcgcctggtcccggcgttcaataagttcctccgcgggaaggatcaccaggaacaagagcagggccggaaggagttcaccgaggccctgctctacctggaacaggagggcctctccaagggcgactacttcctcgggaaccagttcagcctcgtggacatctcgttctatccctggttcgaacggctgcccctcctcgaacacttccgcaagttcaccctgccggcggaaaccacccatctgcagacctggtgggacctggtccgtgatcgttcgagcatccaggccgtggccaatccggtggacttctacctgcagcggttcgcgaaaatcatcggcgaaccggtcgcgatcggcgcggggcagaag

SEQ ID NO: 745 - protein, 228 aa, Artificial Sequence
  Description of Artificial Sequence: Synthetic polypeptide
MTGDHSRSLGKGSAAPGPVPEGVIRLYSMRFCPFAQRTRLVLRAKGIKHEVININLKNKPDWIFEKNPSGLVPILETSKGQLIYESPITCEYLDDAFPGRKLMPSDPYERAFQRMLLERFSKVLCDHALKAELAEKFGKLDEILSQRNTVFYGGDSSSLIDYMIWPWFERLEAFQLKDVLTHTPKLQHWMEAMKKDPAVKDTITDPQTLRVFLQLYFKNSPEACDYGL

SEQ ID NO: 746 - DNA, 684 bp, Artificial Sequence
  Description of Artificial Sequence: Synthetic polynucleotide
atgaccggcgaccattcccggagcctgggtaaaggctcggcggcgcccgggcccgtcccggaaggcgtgatccgcctctactccatgcggttctgtcccttcgcccaacgcacccgcctggtgctgcgcgcgaagggcatcaagcatgaggtgatcaacatcaatctgaagaacaagccggactggatcttcgagaagaacccgtccggcctggtcccgatcctggaaaccagcaagggccagctgatctatgaatccccgatcacctgcgaatacctggacgatgccttccccggtcgcaagctcatgccgagcgatccctacgaacgtgcgttccagcgtatgctgctggagcgcttctccaaggtgctgtgcgaccacgccctcaaggccgagctcgccgagaagttcggcaagctcgacgaaatcctgtcccaacgcaacacggtcttctacggcggcgacagcagctccctcatcgactacatgatctggccctggttcgaacgcctggaggccttccagctcaaagacgtcctgacgcataccccgaaactgcagcactggatggaggcgatgaagaaggaccccgcggtcaaggacaccatcacggacccgcagaccctccgcgtgttcctccagctgtacttcaagaactcgcccgaagcgtgcgactatggcctc

SEQ ID NO: 747 - protein, 251 aa, Artificial Sequence
  Description of Artificial Sequence: Synthetic polypeptide
MSSIPLKHFKKGTPKPELPEDGILRFYSMRFCPYSQRVRLVLEAKKIPHHKIYIDLSEKPEWYTDFSPLGKVPAIQLPGLKGQPALVESLVIAEYLDDQYPGEGPLFPKDPLQKAQDRILIERLAPAVSAVYPVLFTKNPSPDALTNFENALEVFEVEITKRGTPYFAGQKIGIVDYMIWPWFERFPALKYTLPEKYELDSKRFKNLLKWRDLVAQDESVKKTELDAQIHAKFMRTRHANEPNYDVAFEPL

SEQ ID NO: 748 - DNA, 753 bp, Artificial Sequence
  Description of Artificial Sequence: Synthetic polynucleotide
atgagctccatcccgctgaagcacttcaagaagggcacgccgaagccggaactccccgaagacggcatcctgcgcttctacagcatgcgtttctgtccgtactcccagcgggtgcgtctggtgctggaggcgaaaaagatcccgcatcacaagatctacatcgacctgtccgagaagcccgagtggtacaccgatttctccccgctcggcaaagtgccggccatccagctgcccggtctgaaaggccaaccggccctggtggaatcgctggtgatcgcggaatacctggacgaccagtaccccggcgaaggccccctgttcccgaaagacccgctgcagaaggcccaagaccgcatcctcatcgaacgtctggcccccgcggtcagcgccgtctaccccgtgctgttcaccaagaatccgtccccggacgccctgaccaacttcgagaacgccctggaggtcttcgaagtcgaaatcacgaagcgtggcacgccctatttcgcgggccagaagatcggcatcgtggactacatgatctggccgtggttcgagcgcttcccggcgctgaagtacaccctgccggagaagtacgagctcgatagcaagcgtttcaagaacctcctgaagtggcgcgatctcgtggcccaggatgagtccgtgaagaagaccgaactggatgcccagatccacgcgaagttcatgcgtacccgtcacgcgaacgaaccgaactacgacgtcgccttcgagccgctg

SEQ ID NO: 749 - protein, 240 aa, Artificial Sequence
  Description of Artificial Sequence: Synthetic polypeptide
VQRVWIVLEEKRIPYQYIEVNPYKKPDSLLALNPRGLVPTLACPTIQPDGSTAVKPLYESTVINEFLEDAFPNPEQPLHPADPYQKARGRIWIDYVTSRITPSFYRFLQYQGEEEGLNKARREFLGHLKEFILAMDEIGPFFHGSNFMMPDIMLAPLAIRFWIIDQFKKGGLGIPAPGEGGDDEVVWNRWRMWLAVVETRESVASTMSDKEHSMPIYKRYADDVAQSELAKATRAGKGVP

SEQ ID NO: 750 - DNA, 720 bp, Artificial Sequence
  Description of Artificial Sequence: Synthetic polynucleotide
gtgcagcgcgtgtggatcgtgctggaagaaaagcgcatcccctaccagtacatcgaggtcaacccgtataaaaagcccgactcgctgctcgcattgaatccgcgtggcctggtgcccaccttggcgtgtcccactatccaaccggacggcagcactgccgtgaagccgctctacgagagtaccgtgatcaatgaatttctggaggacgccttccccaacccggaacaacccctccatccagcggacccgtaccagaaggcgcgcggtcgcatctggatcgactacgtaacttcccggatcacgccgagcttctatcgcttcctgcagtaccagggcgaggaagagggcctgaataaggcccggcgcgaatttctgggccatctgaaggagttcatcctggcgatggacgagatcggtccgtttttccacggaagcaacttcatgatgccggacatcatgctcgccccgctggccatccggttctggatcatcgaccagttcaagaaaggcggactgggcatcccggcccctggcgaaggcggggatgacgaggtagtttggaaccgttggcgcatgtggttggccgtggtcgaaacccgcgaaagcgtggcgtccaccatgagcgataaggagcactccatgccgatctacaagcgctacgccgatgatgtcgcccagtccgaactggccaaagctacgcgcgccggcaagggtgtacct

SEQ ID NO: 751 - protein, 240 aa, Artificial Sequence; identical to SEQ ID NO: 749
  Description of Artificial Sequence: Synthetic polypeptide

SEQ ID NO: 752 - DNA, 720 bp, Artificial Sequence; identical to SEQ ID NO: 750
  Description of Artificial Sequence: Synthetic polynucleotide

SEQ ID NO: 753 - protein, 233 aa, Artificial Sequence
  Description of Artificial Sequence: Synthetic polypeptide
MLKIISYKICPFVQRVTAMLEAKQMPYQIDYISLKDKPDWFLEISPNGQVPVLITENGTALFESDAIVEYIDEIAPPLHPALSPEQKAIERAWSYQAAKNYLVQCSTMRSHDRATLEERAEKLNALFAKAEKQISGEGFFFGPQPGNVDMAWLPLLHRADIIQRHAGYDFVKNFPSVKAWQKRLLATGLAEKSVSEDFEELFVNFYLSDQTYLGSGKCCDSPKEDVCKTGACC

SEQ ID NO: 754 - DNA, 699 bp, Artificial Sequence
  Description of Artificial Sequence: Synthetic polynucleotide
atgctgaagattatctcatacaagatctgccctttcgtgcagcgagtcacggccatgctggaagcgaagcagatgccctaccagatcgactacatcagcctaaaggacaagcctgactggttcttggagatctcccccaacggtcaggtcccggtactgatcacagagaatggcacggcgctgttcgaaagcgacgcgatcgtggaatacatcgatgaaattgcacccccgctgcaccccgcactgtcccctgagcaaaaagcgatagaacgggcctggtcctatcaggccgccaaaaactacctggtccaatgctccacgatgcgtagccacgaccgtgcaacccttgaagagcgcgccgaaaagctcaacgccctgttcgcgaaggccgaaaagcagatcagcggtgagggcttcttcttcggaccacagccgggcaacgtggatatggcctggctgccgttgctgcatagggcggacataatccaacgtcatgcgggatacgacttcgtgaagaatttcccgagtgtaaaggcctggcagaagcgtctgctggccactggcctggccgaaaagagcgtctccgaggacttcgaggagctgtttgtgaacttctacctttcggaccagacctacctgggctcgggcaaatgctgtgattctcccaaagaggacgtctgcaagacaggcgcgtgctgc

SEQ ID NO: 755 - protein, 239 aa, Artificial Sequence
  Description of Artificial Sequence: Synthetic polypeptide
GSEKCLAKGCPTPGPVPEGTIRVYSMRFCPYAQSARLVLAAKEIKHEVININLKNQPDWFFEKSPSGLVPSLETSNGQVIYESPIVCDYLDEVYPGKKLTPADPFQKAQQKMTVEHFSKVTAVLYKILCAKANNEDLSGAKEELQEKLLKLDEILAKQNSHFFGGSEVSMVDYMIWPWFELLIIFDVKDCLNKTPLIDKWCQQMLQDPAVKATYIEPDAMLSFFKLYIQGDLEACDYGL

SEQ ID NO: 756 - DNA, 717 bp, Artificial Sequence
  Description of Artificial Sequence: Synthetic polynucleotide
ggcagcgaaaagtgcctcgccaaggggtgccctacccctggaccggttccggaggggactatccgggtgtattctatgagattctgtccgtatgcgcagagtgcgagactcgtactggcggccaaggagatcaagcatgaggtgatcaatatcaacctcaagaaccaacccgattggttctttgagaagagtccgtcaggcctcgtcccgagcctcgaaacctcgaacgggcaggtgatttacgagtccccgatcgtgtgcgactacctggacgaggtatatccaggcaagaagttgacccctgccgacccattccagaaggcccagcagaagatgaccgtcgagcatttttctaaggtcaccgccgtcctgtacaagatcctctgcgccaaggctaacaacgaagacctgtccggcgccaaggaagagcttcaggaaaagctgctgaagctggacgagatcctggccaagcagaactctcacttcttcggcggatcggaggtaagcatggtggactacatgatctggccttggtttgagctgctgatcatcttcgatgtcaaggactgtctcaataagaccccgctgatcgacaagtggtgccagcaaatgttgcaagatccggctgtcaaggcgacttacatcgagcccgacgccatgctgagcttcttcaagctgtacatccagggcgatctggaggcctgcgattacggcctg

SEQ ID NO: 757 - protein, 250 aa, Artificial Sequence
  Description of Artificial Sequence: Synthetic polypeptide
MALPQMHFKRGSPKPEIPEDGVLRYYTMRFCPYSQRVNLILNAKKIPHHTVYIDLSEKPEWYIDYSPLGKVPAIQLPQLPGQPALVESLVIAEYLDEQYPGAGPLFPKDPLQKALDRILIERLAPAVSAIYPVFFTKDPPADAIPNFEKALDVFEQEITKRGTPYFGGDKIGIVDYMIWPWFERFPALQYTLDSKYQLDKTRYKNLLQWRDLVAQDEAVKATTLDPRIHAKFMRTRHEAKPDYDIAFEPL

SEQ ID NO: 758 - DNA, 750 bp, Artificial Sequence
  Description of Artificial Sequence: Synthetic polynucleotide
atggccctcccccagatgcacttcaaaagaggctcgccgaagccggaaataccggaagatggcgtgctcaggtattacaccatgcgcttctgtccgtactcccagcgcgtaaacctcatcttgaacgccaagaagattccccaccacaccgtgtacattgacctctcggagaagccagaatggtacatcgactactccccgcttggcaaggtcccggcgatacagctgccccaacttccgggacagccggccctggtcgaatccttggttatcgccgaatatctggacgagcaatacccgggtgccggcccactcttcccaaaggaccctctgcagaaagcgctggatcgtatcctgattgagcgcctggcgcccgcagtatccgcaatttaccccgtgttcttcaccaaagatcccccggcggacgcgatcccgaacttcgagaaggcgctggacgtgttcgaacaggagatcaccaagcgcggaaccccgtacttcggtggcgacaaaatcgggatcgtagactacatgatctggccgtggtttgagcggttccccgccctgcagtacactctggacagcaagtaccaactggataagactcgatacaagaacttgctgcagtggcgcgatttggtcgcccaggatgaagccgtgaaggcgaccacgctggacccgcgcatccatgccaagttcatgcggacgagacacgaggccaagccagactacgatattgcgttcgaaccgctc

SEQ ID NO: 759 - protein, 241 aa, Artificial Sequence
  Description of Artificial Sequence: Synthetic polypeptide
MTGSEKCLAKGCPTPGPVPEGTIRVYSMRFCPYAQSARLVLAAKEIKHEVININLKNQPDWFFEKSPSGLVPSLETSNGQVIYESPIVCDYLDEVYPGKKLTPADPFQKAQQKMTVEHFSKVTAVLYKILCAKANNEDLSGAKEELQEKLLKLDEILAKQNSHFFGGSEVSMVDYMIWPWFELLIIFDVKDCLNKTPLIDKWCQQMLQDPAVKATYIEPDAMLSFFKLYIQGDLEACDYGL

SEQ ID NO: 760 - DNA, 723 bp, Artificial Sequence
  Description of Artificial Sequence: Synthetic polynucleotide
atgacagggtccgagaagtgcctggcaaagggttgcccgactcccggccccgtcccagagggcaccatacgtgtttatagcatgaggttctgcccgtatgcacagagcgccagactggtgctcgcagcgaaggaaatcaagcacgaggtcattaacataaaccttaagaaccagcctgactggttcttcgagaagagcccgagtggcctagttccctcgcttgaaacctcgaacggtcaggtcatctatgagtcgcccatcgtttgcgactacctagacgaggtgtatcctgggaagaagctgaccccagcggacccttttcagaaagcccagcaaaagatgactgtggagcatttttcgaaggtgaccgccgtattgtacaagatcctgtgcgccaaggcgaacaatgaggacctatccggagccaaggaagaactccaagagaagctgctgaagctcgacgagatcctggccaagcagaactcccacttcttcggcggcagtgaggtgtccatggtcgactatatgatctggccgtggttcgagctgctgataatcttcgacgtcaaggactgcctgaataagaccccgctgatcgataagtggtgccagcagatgctccaggaccctgccgtcaaagccacctacatcgaaccagacgccatgcttagcttcttcaagctctacatccagggcgatctggaagcctgtgactacggtctg

SEQ ID NO: 761 - protein, 227 aa, Artificial Sequence
  Description of Artificial Sequence: Synthetic polypeptide
MSRLTLISHHLCPYVQRAAITLVEKSVEFERINIDLADKPDWFLKISPLGKVPLLRIEEEDGSEAILFESSVICEYLEETQAGAALHPADPLTRARHRGWMEFGSSVLSDLWGYETAQDAAQLEIKRKALAAKFATIEDALADGPYFAGSSFSLVDAVFAPVFRYFDLFDALGDGGIFDGLDRVKRWRKALSARVSVRDAVGEDYPQRLTEFLEKHNSILLRLPAAA

SEQ ID NO: 762 - DNA, 681 bp, Artificial Sequence
  Description of Artificial Sequence: Synthetic polynucleotide
atgagtagactcaccctgatttctcatcatctgtgcccctacgtgcagcgagccgccataacgctggtcgaaaagagcgtcgagttcgaacgcatcaacatcgacctcgcggacaagcccgactggttcttgaaaatcagccccctcggcaaggtcccgctgcttcgcatcgaggaagaagatgggtccgaggcgatcctgttcgagtcgtccgtcatctgcgagtacctagaagagacccaagcgggagccgcgctacatccagccgaccccctcacccgcgcccggcataggggctggatggagttcggatcttccgtactgtcggacctgtggggctatgagacggcccaagatgccgcccagctggagatcaagcgcaaggccctagcggcaaagttcgcgacaatagaggacgcgcttgccgacgggccatacttcgccggatcttcatttagcctcgtcgatgcggtgtttgccccggtgttccgctacttcgacctgttcgatgccctgggcgatggtggcatcttcgacgggctcgatcgggtgaaacgatggcgcaaagccttgtccgctagagtcagcgtacgcgacgctgtcggggaagactatccccagcgcctgaccgagttcctggagaagcacaatagcatcctgttgcgtctgccggctgcggcc

SEQ ID NO: 763 - protein, 241 aa, Artificial Sequence
  Description of Artificial Sequence: Synthetic polypeptide
MSSGKHLAKGSPRPALPDDGVPRLYSMRFCPYAQRAHLVLNAKKVPHHSVYINLTEKPEWLVEVSPLLKVPALHLVAEKEQPSLIESLIISEYLDEKYPQSPLLPKDPLKRAQDKILVERFSGVTGSYMKILLHDASPDELWAALDIFEEELGKRGTPYFGGDKPGFVDYMIWPWFERLAVLKYVLGERYSFDSQRFAKLSAWIELLLKDDVVKSFFATPEQHVEFWRTRKAGNASYDLLA

SEQ ID NO: 764 - DNA, 723 bp, Artificial Sequence
  Description of Artificial Sequence: Synthetic polynucleotide
atgtcgagtggtaagcacctagccaagggctccccacgcccggcattgccggatgacggggtgccccgcctctactcgatgcggttttgcccgtatgctcagcgcgcccatctggtgctaaacgctaagaaggtccctcaccactccgtgtacatcaacctcaccgagaaaccggagtggctggtcgaggtgagcccgttgctaaaggttccggctctccacctggtcgccgagaaggagcagccttcgctcattgaatcactgatcatctcggaatacctggacgagaaatatccccaaagcccgcttctgcctaaggaccctctgaagcgtgcgcaggacaagatcctggtcgagcgcttctccggagtcactggcagctacatgaaaatcctgctgcatgacgcatcgcccgacgaactctgggccgcattggacatctttgaggaggagctaggcaaacgtggcactccgtactttggcggcgataagccaggcttcgtcgattacatgatctggccctggtttgagcggctggcggtcctgaagtatgtgctcggggaacgctacagtttcgattcgcaaaggttcgccaagctgagcgcatggatcgagctgttgctgaaggacgacgttgtgaaatccttcttcgccacaccggagcagcacgtcgagttctggcgtacccgcaaagctggcaacgcgtcctatgatctcctggcc

SEQ ID NO: 765 - protein, 243 aa, Artificial Sequence
  Description of Artificial Sequence: Synthetic polypeptide
MSNGRHLAKGSPTPDVPEDGILRLYSMRFCPFAQRVHLVLDAKQIPYHSIYINLTDKPEWLLDKNPQGKVPALELVREPGPPVLTESLLICEYLDEQYPLRPLYPRDPLKKVQEKLLIERFGPVLGAFFRASDGGDLEPFWAGLDTYEKELSRRGTDFFGGEQTGILDYMIWPWCERLELLKLQRGEEYNYDEARFPQLTLWVERMKRDQAVMAFYMEAEVQAEFLRTRAAGHPNYNLLVKEA

SEQ ID NO: 766 - DNA, 729 bp, Artificial Sequence
  Description of Artificial Sequence: Synthetic polynucleotide
atgagtaacggacgacacctggccaagggttcgcctactcctgacgtccccgaagacggaatcctgcggctctactcgatgcgattctgcccgtttgcccagcgcgtgcacctggtcctggacgctaagcaaattccgtaccattccatctacatcaacctgaccgataagcccgagtggttgctcgacaagaatccgcagggcaaggtacctgcgctggagctggtccgcgagccaggaccaccggttctgaccgagtcgctgctgatctgcgagtacctcgacgagcagtatccgctgcgcccgctctacccgagagatccgctgaagaaggtgcaggagaagctgctgatcgaacgctttgggccggtgcttggggccttcttccgtgcgagtgatggcggcgacctggaacccttctgggctggcctggacacctacgagaaggagctgtcacgccgcggcacggacttcttcggcggcgagcaaaccggcatcctggactatatgatctggccctggtgtgagcgactggaactgctcaagctgcagcgcggcgaagagtacaactatgacgaagcgaggttcccacagctcacgctgtgggtcgagcgtatgaagcgcgatcaggccgtgatggcattctacatggaggccgaagtccaagccgagttcctcagaactagagccgcaggccacccgaactacaacctgctggtgaaggaagca

SEQ ID NO: 767 - protein, 240 aa, Artificial Sequence
  Description of Artificial Sequence: Synthetic polypeptide
MSQDSSKSLGKGSSPPGPVPDGVIRVYSMRFCPFAQRTLLVLKAKGIKHEIININLKNKPDWFFKKNPFGLVPVLETSQGQLIYESVITCEYLDETYPKKLFPEDPYEKAFQKMILELFSKVPPLFKDLMAGGNGGDSSAQKAGLQTVFSSLEEVLTHQRTAFFGGNTISMIDYLIWPWFERLSAYGIAHCVDHTSKLKLWIAAMKKDPTVKALLREEKALKNFLHLYFQNSLEACDYGL

SEQ ID NO: 768 - DNA, 720 bp, Artificial Sequence
  Description of Artificial Sequence: Synthetic polynucleotide
atgagccaggacagtagcaagtcgttgggcaagggtagctcccctccgggtccggtgcctgacggggtgattcgcgtttattccatgcgcttttgcccgttcgcccaacgcactctgctggtcctcaaggctaagggcatcaagcacgagatcatcaacatcaatctcaagaacaagcccgactggttcttcaagaagaacccgttcggcctggtacccgtactggagacgagccaaggccagctgatatacgagagtgtcatcacttgcgagtatctggacgaaacgtaccctaagaagctgttccccgaggacccatacgaaaaggcgtttcagaagatgatcctggagctgttcagtaaggttccgcccctgttcaaggatctgatggctggcggcaacggcggcgacagttcagcccagaaagcggggctgcagacggttttctcaagtctggaggaagtgctgactcatcaacggactgccttctttggcggcaacaccatcagtatgatcgattacttgatctggccgtggttcgaacgcctgtcggcgtacggcatcgcccactgcgttgaccacaccagcaagctgaaactgtggatagccgcgatgaagaaggaccccacagtgaaggcgcttctgcgggaggagaaggccctgaagaacttcttgcatctgtacttccaaaactcgctggaagcgtgcgactatggcctg

SEQ ID NO: 769 - protein, 222 aa, Artificial Sequence; identical to SEQ ID NO: 495
  Description of Artificial Sequence: Synthetic polypeptide

SEQ ID NO: 770 - DNA, 666 bp, Artificial Sequence
  Description of Artificial Sequence: Synthetic polynucleotide
atgaccacactccagttgtacttcgcgaagggtagcacgttctcgcagcgtacgcgcgtggttctcctggaaaagggcatcaacttcaccggcattgaggtggacctgcaaaacaagagggagacctttacccaggtgtcagcttacggtaaggtcccggcgatcaagcacggcgatatcgaaatctacgagtcggcaatcatcaacgagtacctggaagaggtgttcccagaaccagccctcctcccgcgtgaccctgacggtaaagcgatagcccgtatctggatcgactacgcaaatacgcggctggtgcctgcctttaataaactactccgcggcaaggattcacaggagcaggagcaggggcgcaaagagttcctggaaagcctgctctacatcgagcagaagggcctgggccagagttcaaacggcgcctattggctgggcgaaaacctgagcctggtcgacatctcgttctacccgtggttcgagaggctgccggtactagaaaagttccgaaacttctctctgcccgaggaaaccccgagactccaggaatggtgggaaaatctacgccgaagggagagcatccagcaggtggccaattcgacggagttctacatagatcgctttagtcagatcctcggcctcaagaccaccttgaag

SEQ ID NO: 771 - protein, 256 aa, Artificial Sequence
  Description of Artificial Sequence: Synthetic polypeptide
MSAIKDSRNINFNTKHLRKGDPLPPFNGKLRVYNMRYCPYAQRTILALNAKQIDYEVVNIDLIDKPEWLTTKSAFAKVPAIEIAEDVTIYESLVTVEYLDEVYPKRPLLPQDPLKKALDKIIVEASAPIQSLFIKILKFSDTVNEEHVAAYHKALDFIQEQLKNRGTVFLDGSEPGYADYMIWPWFERLRAFAHDERVRLEPSKYSLLLEYIDNMLKDSAVSQYLIPLEILAKFHEAYTKKERPNYELLNECLKSF

SEQ ID NO: 772 - DNA, 768 bp, Artificial Sequence
  Description of Artificial Sequence: Synthetic polynucleotide
atgtcggcgatcaaggacagcaggaacatcaacttcaataccaagcacctgcgtaagggtgatccgctgcccccgttcaacgggaagttgagagtgtacaacatgcgttattgcccgtacgcacagcgtaccatcctggccctgaatgcaaagcagatcgattacgaggtggttaacatcgatctgatcgacaagcctgagtggctgaccacaaagagcgcgttcgccaaggtgccggcgatagaaatcgcggaggacgttaccatctacgaatcactggtgaccgttgagtatttggatgaagtgtatccgaagcgcccgttgctgccgcaggaccccctgaagaaagccttggataagatcatcgtggaggcgagtgcgccgatccagtccctgttcatcaagatactcaagttctcggacaccgtcaacgaggagcatgtcgccgcctatcacaaggcgctggacttcatccaggaacagctgaagaaccgcggtacggtcttcctcgatggtagtgagccgggttatgcggactatatgatctggccgtggttcgaacggctgcgagcctttgcgcacgacgaaagggtgcgcttggaacccagcaagtacagcctgctgctggagtacatcgacaacatgctgaaagacagcgccgtatcgcagtacctgatccccctggagatcctcgccaagttccatgaggcttacaccaagaaagaaaggccgaactacgaactgctcaacgaatgcttgaagtcgttc

SEQ ID NO: 773 - protein, 256 aa, Artificial Sequence
  Description of Artificial Sequence: Synthetic polypeptide
MSAIKDSRNINFNIKHLRKGDPLPPFNGKLRVYNMRYCPYAQRTILALNAKQIDYEVVNIDLIDKPEWLTTKSAFAKVPAIEIAEDVTIYESLVTVEYLDEVYPKRPLLPQDPLKKALDKIIVEASAPIQSLFIKILKFSDTVNEEHVAAYHKALDFIQEQLKNRGTVFLDGSEPGYADYMIWPWFERLRAFAHDERVRLEPSKYSLLLEYIDNMLKDSAVSQYLIPLEILAKFHEAYTKKERPNYELLNECLKSF

SEQ ID NO: 774 - DNA, 768 bp, Artificial Sequence
  Description of Artificial Sequence: Synthetic polynucleotide
atgtccgcgatcaaggactcccgcaacatcaacttcaacatcaagcatctgcgcaagggggacccgctgcccccgttcaacggtaagctgcgcgtctacaacatgcgttactgtccctacgcgcagcgtaccatcctggcgctgaacgccaagcagatcgactatgaggtggtcaacatcgacctgatcgacaagcccgaatggctgaccaccaagtccgccttcgccaaggtccccgccatcgagatcgcggaggacgtcaccatctatgagagcctggtgaccgtcgagtacctggacgaggtgtaccccaagcgtcccctcctcccgcaagatcccctgaagaaggccctggataagatcatcgtcgaggccagcgccccgatccaatcgctcttcatcaaaatcctcaagttctccgacaccgtcaatgaggagcatgtggcggcgtaccataaggcgctggacttcatccaagagcagctgaaaaaccgcggcacggtcttcctggacggctccgaaccgggttacgccgattacatgatctggccgtggttcgaacgcctccgggccttcgcccatgacgaacgggtgcgcctcgaaccgagcaagtactcgctgctgctggagtacatcgacaacatgctgaaggactccgcggtctcgcaatacctcatcccgctggaaatcctggccaagttccacgaagcctatacgaagaaggaacgccccaactacgagctcctgaatgagtgcctgaagtcgttc

SEQ ID NO: 775 - protein, 254 aa, Artificial Sequence
  Description of Artificial Sequence: Synthetic polypeptide
MSEKHLQTGDVLPPYSGKLRVFAMRFCPYAERTVLTLNAKNIPYDLVFINLDQKPEWIFNFSPKGTVPALEYEPGKALFDSNIINVYLDEKYPEIPLQASDPLRRAQDKILVESFAPAQSAYYTAAFNAQALEPSMVETYHKGLEGLQKELETRSTKYLHGDEPGWVDYTLWPFLERFEALPLIGKAEFAIDQTKYERLVTYIEAMKNVPAVKSYFLAAETHAKFIESRAQGDANYNMLDTSAVCCMRPRKKKE

SEQ ID NO: 776 - DNA, 762 bp, Artificial Sequence
  Description of Artificial Sequence: Synthetic polynucleotide
atgagcgaaaagcatctgcagaccggcgacgtgctcccgccctactcgggtaagctgcgcgtgttcgccatgcggttctgtccgtacgccgagcgcaccgtgctgaccctgaacgccaagaatatcccgtacgacctggtcttcatcaacctggaccagaagcccgaatggatcttcaacttctccccgaaggggaccgtgccggccctggaatatgagccgggcaaggccctgttcgactccaacatcatcaacgtgtacctggacgaaaagtaccccgaaatcccgctgcaggccagcgacccgctccgtcgggcccaagataagatcctggtcgagagcttcgccccggcgcagtcggcctactacaccgcggcgttcaacgcccaagccctggagccgtccatggtcgaaacctaccataagggcctggaaggcctgcagaaggagctggagacccgtagcaccaagtacctccatggggacgaaccgggctgggtcgactataccctctggccgttcctggagcgcttcgaagccctgccgctcatcggcaaggcggagttcgccatcgaccagaccaagtacgaacgcctggtgacgtacatcgaagccatgaagaacgtgcccgccgtcaagtcgtacttcctggcggccgaaacccacgccaagttcatcgaatcgcgggcgcagggtgacgcgaattacaacatgctcgacacctcggccgtgtgttgcatgcggccccgtaagaaaaaggaa

SEQ ID NO: 777 - protein, 305 aa, Artificial Sequence
  Description of Artificial Sequence: Synthetic polypeptide
MKDFQDQVAFITGGASGAGFGQAKVFGQAGAKIVVADVRAEAVEKAVAELEGLGITAHGIVLDIMDREAYARAADEVEAVFGQAPTLLSNTAGVNSFGPIEKTTYDDFDWIIGVNLNGVINGMVTFVPRMIASGRPGHIVTVSSLGGFMGSALAGPYSAAKAASINLMEGYRQGLEKYGIGVSVCTPANIKSNIAEASRLRPAKYGTSGYVENEESIASLHSIHQHGLEPEKLAEAIKKGVEDNALYIIPYPEVREGLEKHFQAIIDSVAPMESDPEGARQRVEALMAWGRDRTRVFAEGDKKGA

SEQ ID NO: 778 - DNA, 915 bp, Artificial Sequence
  Description of Artificial Sequence: Synthetic polynucleotide
atgaaggatttccaggaccaggtcgcgttcatcactggtggcgccagcggggctggcttcggacaagccaaggtgttcggtcaggcgggcgccaagatcgtggtcgccgacgtccgcgccgaagcggtggaaaaagcagtggcagaactcgaaggcttgggcatcaccgctcacggcatcgttctggatatcatggatcgggaggcctatgcgcgcgccgcggacgaggtggaggccgtcttcggtcaggcccctacgttgctgagcaacaccgcgggcgtcaacagcttcggcccgatcgagaagaccacctacgatgatttcgactggatcatcggcgtgaacctgaacggggtaatcaacggaatggtaaccttcgtcccccggatgatcgcgtcgggacggccaggccacatcgtgactgtctccagtctgggcgggtttatgggctcggccctcgccggtccatatagcgctgccaaagccgcctcgatcaacctgatggaaggctaccgccaggggctggaaaagtacggtatcggcgtatcggtgtgtacccccgcgaacatcaagtcgaatatcgcggaggctagccggctgcggcccgcgaagtatggcaccagcggctacgtcgaaaacgaggaaagcatcgcgagtctgcactccatccaccagcatggcctggaaccggagaagctggctgaagccatcaagaagggcgtcgaggacaatgcgctctacatcattccctacccggaagtgcgcgagggcctggagaagcatttccaggccatcattgactcggtggcccctatggagtcggaccccgaaggtgcccggcagcgggtggaggccctgatggcgtggggccgtgatcgcacccgcgtattcgccgaaggcgacaagaaaggggcc

SEQ ID NO: 779 - protein, 306 aa, Artificial Sequence
  Description of Artificial Sequence: Synthetic polypeptide
MQSFENEIAFITGGASGAGFGQAQVFGRAGAKIVVADVRAEAVERAVAALKAEGIVAHGLVLDITDRQAYAGAADEVEQVFGAAPTLLFNTAGVNSFGPVEDTSYDDFDWIVGVNLGGVINGMVTFVPRMIASGRPGHIVTTSSLGGLMGSALAAPYSAAKAAVINLMESYRQGLDKHGIGVSVLCPANIKSNIAEASRLRPAQFGKSGYVENEESIASLHSIHQHGMDPVELAEHVKAGIVANQLYIIPYPEAKDGLRQHFDAIVDAVLPLEADPEGARARTEALNAWAADRARVFMEKNAAQKA

SEQ ID NO: 780 - DNA, 918 bp, Artificial Sequence
  Description of Artificial Sequence: Synthetic polynucleotide
atgcagagcttcgaaaacgagattgccttcattaccggcggcgcgagcggtgcggggttcgggcaagcccaggtattcgggcgggccggcgccaaaatcgtcgtcgccgacgtgcgtgctgaagccgtagagcgcgccgttgctgccctcaaggccgaaggcatcgtcgcccatgggctggtcctggacattacggatcgtcaggcgtatgcgggcgccgcggacgaggtagagcaggtgttcggcgccgcaccgaccctgttgttcaacactgccggcgtcaacagctttggcccggtggaagacacctcctatgatgacttcgactggatcgtcggcgtgaacctgggcggcgtgatcaacggcatggtcactttcgtcccccgcatgatcgcgtccgggcgtcccggccacattgtgaccactagcagtctcggcggactgatgggaagtgcgttggccgccccatacagcgcggcgaaagcggccgtgatcaatctcatggagagttaccggcagggcctcgacaaacacggcatcggagtgagcgtgctgtgtcctgccaacatcaagtcgaacatcgcggaagcatcccgcctccgccccgcccagttcggcaaaagtggctatgtggaaaacgaggagtcgatcgcgtcgctccatagcatccatcaacacggaatggacccggtcgagctcgccgagcacgtcaaagccggcatcgtggccaaccagctgtatatcatcccatacccggaggcgaaagacggtctgcgccagcacttcgacgccattgtcgatgcggtgctgcccctcgaagccgacccggagggcgcccgcgcccgcacggaggccctgaacgcttgggccgcggaccgggcccgcgtcttcatggagaagaacgcggcccagaaagcc

SEQ ID NO: 781 - protein, 297 aa, Artificial Sequence
  Description of Artificial Sequence: Synthetic polypeptide
MTQVAGRTAFITGGGSGVALGQAKVFAKAGCRIAIADIRQDHLDEAMAHFANTDATVMPVLLDITDREAYRRAADDVEAELGPVELLFNTAGVSHFGAIQDATHDDWDWQIDVNLRGVINGIRTFVPRMVERGNGGHIVNTASMSAFVALKGTGIYCTTKMAVRGLTETLALDLDGTGIGVSLLCPGAVNTNIHEALLTRPKHLAETGYYQADPAMFEHLKKVIEIGMEPETLAQHVLKGVQEDQLYILPYAEFRGALEDIHARVMSALARPEDDPDFDRRVARGVPGGERKQEEAA

SEQ ID NO: 782 - DNA, 891 bp, Artificial Sequence
  Description of Artificial Sequence: Synthetic polynucleotide
atgacccaggtggctggccgtaccgcctttatcactggcggtggctcgggcgtagccctgggccaggcgaaggtgttcgcgaaagcgggctgtcgcattgcaatcgcggatatccgtcaggaccacctggacgaggccatggcccacttcgccaacaccgacgccaccgtgatgccagttctgttggatatcaccgaccgcgaggcgtatcgccgcgctgccgacgacgtggaggccgaactgggccccgtcgagctgctgttcaataccgcgggtgtgagtcatttcggcgccatccaggacgcgacccacgacgactgggactggcagatcgacgtgaacctgcgcggcgtcatcaatggtatccgtaccttcgtcccccgcatggtagaacgcggcaacggcggccatatcgtcaataccgctagcatgtccgccttcgtcgccctgaagggcaccgggatctactgcacgaccaagatggccgtccggggcctgaccgaaaccctcgcgctcgacctggacggcacgggtatcggcgtctccctgctgtgtccgggcgcggtcaacaccaatatccacgaggccctcctgacccgccctaagcacctcgccgagacgggctattatcaagctgaccccgccatgttcgagcacttgaagaaggtgatcgagatcggcatggagccggagaccctcgcccagcacgtgctgaaaggcgtccaggaggaccagctgtatatcctcccgtatgccgagttccgcggcgccctggaagacatccacgcgcgggtaatgtcggctctggctcgcccggaggatgaccccgacttcgaccgccgtgtggcgcggggcgtcccaggcggcgaacgtaaacaggaagaggccgcc

SEQ ID NO: 783 - protein, 297 aa, Artificial Sequence
  Description of Artificial Sequence: Synthetic polypeptide
MQDLEGKVAFVTGGGSGVALGQAKVLAEEAQMKVVIADIRQDHLDEAMGYFSQKNVAVHPVRLDLTDRAAYAAAVDEAEQVFGPVDLLCNTAGVSQFGPIEKATFDDWDWQMDVNVNGVINGVMTVMPRMIERGQGGHILITASMSAFVALPTTGIYCTTKYAVRGLAESLRVEMPKYNIGVSLLCPGGVNTNIHRSVEARPEKYGNTGYYGRDEAVFAGLKRVIEHGFDPVDLGRVVLDAVRNDRFWVLPYPEFAEGQKARDQEVIDAMMSYADHPDYARRMKIREQMKRDMPGSD

SEQ ID NO: 784 - DNA, 891 bp, Artificial Sequence
  Description of Artificial Sequence: Synthetic polynucleotide
atgcaggacttggagggaaaggtagccttcgttacgggcggcggctcgggagtagccttgggccaggccaaggtcttggccgaggaagcacaaatgaaggtagtcatcgccgacatccgccaagaccacctggatgaagccatgggctacttcagccagaagaacgtcgccgtccatccggttcgcctggacctgaccgaccgcgcagcctatgcagcggctgtagacgaggcggagcaggtgttcggtccggtcgatctgctgtgtaacacggccggagtctcccagttcgggccgatcgaaaaggccaccttcgacgactgggactggcagatggacgtgaatgtgaacggcgtgatcaacggcgtgatgaccgtcatgccgcgcatgatcgagcggggccagggtggccacatcctgatcacggcctcgatgtcggccttcgtagccttgccaacgaccggcatctactgcaccaccaaatacgccgtgcgtggcctggccgaaagcctgcgcgtggaaatgccgaagtacaacatcggtgtcagcctgctgtgtcctgggggcgttaacaccaacatccatcgttccgtcgaagctcgcccagagaagtacggcaacaccggctactacggccgcgacgaagcggtgttcgccggtctgaagcgcgtaatcgagcatggcttcgatccggttgacctgggtcgcgtcgtgctggatgcggtgcgcaacgaccgcttctgggtgctgccgtatccagagttcgccgaagggcaaaaggcgcgcgaccaggaagtgatcgacgccatgatgagctacgcggatcacccggactacgcacgccggatgaagatccgggaacagatgaagcgcgacatgccaggcagcgat

SEQ ID NO: 785 - protein, 300 aa, Artificial Sequence
  Description of Artificial Sequence: Synthetic polypeptide
MQDLSGRTAFVTGGANGVGLGLARALVAEGCKVAIADIREDALEQALKLLENQEVMGVQLDVSSREGFAEAADRVERELGPVSLLFNNAGVNLFQSIDESSYDDWDWLLGVNLHGVINGVATFAPRMKERGQGGHICNTASMAAFLGSGVPGIYNTTKFAVRGLSESLRYSLAPHGIGVSMLCPGLVKTHIFASDEIRPSTLRAGAKDVNRAFVSQLEKVHEAGMEPEVIAQRTIDAVKENRFYIFSHPEFREELAEVFAEVIDAFRDYPADPGLDARLKIEEGRRARYKEAREAARSMT

SEQ ID NO: 786 - DNA, 900 bp, Artificial Sequence
  Description of Artificial Sequence: Synthetic polynucleotide
atgcaggacctcagcgggcgcaccgccttcgtgaccggtggcgcgaacggcgtgggcttgggcctcgcgcgcgcactggtggcagaggggtgtaaggtagccatcgccgacatccgcgaggacgcgttggagcaagcgctcaagctgctggagaaccaggaagtcatgggagtgcagctcgacgttagcagccgggaaggcttcgcggaggcggccgaccgcgtcgaacgtgagctgggcccggtatccctcctgttcaataacgcgggtgttaacctgttccagtcgatcgacgaatcgtcctacgacgattgggattggctcctgggcgtgaacctccatggcgtcatcaatggcgtggctaccttcgcgccgcggatgaaggagcgcggccagggcggacacatctgtaacaccgcctcgatggcggccttcctgggcagcggagtgccaggtatctacaacactaccaagttcgctgtccgcggtctgtccgaaagcctccgttacagcctcgccccacatgggatcggcgtgagtatgctgtgtccgggcctggtgaagacccacatcttcgcgtccgacgaaatccgcccatccaccctgcgcgctggcgccaaagacgttaaccgcgcgttcgtatcccagctggagaaggtgcacgaggctggcatggaaccggaggtgatcgcgcagcggaccatcgacgcagtgaaagagaaccgcttctacatcttcagccatcccgagttccgggaagagctcgccgaggtgtttgccgaggtgatcgacgccttccgcgattatcccgctgaccctggcctggacgctcgtctgaaaatcgaagaaggtcgccgtgcccgttacaaggaggcccgcgaggccgcccggagcatgact

SEQ ID NO: 787 - protein, 310 aa, Artificial Sequence
  Description of Artificial Sequence: Synthetic polypeptide
MKDFAGRTAFVTGGANGVGIGLVRQLLNQGCKVAIADIRQDSIDKALATLEAEGSGPEVMGVQLDVASREGFKMAADEVEARFGPVSILCNNAGVNLFQPIEESSYDDWDWLLGVNLHGVVNGVTTFVPRMVERVKAGEQKGGHVVNTASMAAFLAAGSPGIYNTTKFAVRGLSESLHYSLLKYEIGVSVLCPGLVKSYIYASDDIRPDALKGEMKPVDKTAVERLAGVHEFGMEPDVIGARVIEAMKANRLHIFSHPDHKEELREIFDEIIAEYQDYPKDPGYDQRVAFEKFRADSFAEARRQSRAADF

SEQ ID NO: 788 - DNA, 930 bp, Artificial Sequence
  Description of Artificial Sequence: Synthetic polynucleotide
atgaaagatttcgcgggccgcacggcgttcgtgaccggcggcgctaacggcgtgggcatcggcctggtacgtcaactgctgaaccaggggtgcaaagtagccatcgcagatattcgccaggacagcatcgacaaggccctcgcgaccctggaagctgaaggctcgggtcctgaagtgatgggcgtccagctcgacgtcgccagccgggaaggcttcaagatggcggccgacgaagtggaagctcgcttcggccctgtgtcgatcctgtgtaacaacgcgggagtgaacctgttccagccgattgaggagagttcgtacgacgattgggactggctgctgggcgtcaatctccacggagttgtcaacggcgtcaccactttcgtgccgcggatggtcgaacgcgtcaaggcgggtgaacaaaagggcggccacgtcgtcaatactgcgagtatggccgcatttctggcggctggcagccccggcatctacaacaccaccaagttcgccgtccggggcctctccgaatcgctgcactactcgttgctcaagtacgagatcggggtctcggttctctgtccgggcctggtcaagtcctacatctacgcctcggatgacatccggcccgatgccctgaagggcgagatgaagcctgtcgacaagactgccgtcgagcgtctggccggggtgcacgaatttggtatggaacccgacgtaatcggcgcccgcgtcatcgaagcgatgaaggccaaccggctccacatcttcagccatcccgaccacaaggaggaactccgcgagatcttcgatgagatcatcgcggagtaccaagactacccaaaagacccgggctatgatcagcgcgtcgcgttcgagaagttccgcgcggacagcttcgcggaggcacgtcgtcaatcccgtgccgccgacttc

SEQ ID NO: 789 - protein, 319 aa, Artificial Sequence
  Description of Artificial Sequence: Synthetic polypeptide
MSLKDFAGRTAFVTGGANGVGIGLVRQLLNQGCKVAIADIRQDSIDKALATLEAEGSGPEVMGVQLDVASREGFKMAADEVEARFGPVSILCNNAGVNLFQPIEESSYDDWDWLLGVNLHGVVNGVTTFVPRMVERVKAGEQKGGHVVNTASMAAFLAAGSPGIYNTTKFAVRGLSESLHYSLLKYEIGVSVLCPGLVKSYIYASDDIRPDALKGEVKPVDKTAVERLAGVHEFGMEPDVIGARVIEAMKANRLHIFSHPDHKEELREVFDEIIAEYQDYPKDPGYDQRVAFEKFRADSFAEARRQSRAADEGHHHHHH

SEQ ID NO: 790 - DNA, 957 bp, Artificial Sequence
  Description of Artificial Sequence: Synthetic polynucleotide
atgtccctcaaagacttcgcgggacgcaccgcctttgttaccggaggcgcgaatggggtcggcatcggcctggtccgtcaactgctgaaccaaggctgtaaggtggccatcgctgacatccgccaagactccatcgataaggcgctggcgaccctggaggctgaaggctcgggccctgaagtcatgggagtgcagctggacgtggcatcccgggaaggtttcaagatggccgccgatgaggtggaggcgcggttcggcccagtgagtatcctgtgtaacaacgccggagtaaacctgttccagcccatcgaagagtcctcgtatgacgactgggactggctgttgggggtcaacctgcacggagtcgtcaacggcgtcaccacgttcgtcccccgtatggtggagcgcgtaaaggccggcgagcagaagggcggccatgttgttaacaccgccagtatggcagcgttcctggcggccggtagccccggcatctacaacacgaccaagttcgcggtgcgtggcctcagtgaaagcctgcactacagtctcctgaagtatgagatcggcgttagcgtgctgtgtccgggcctggtcaaaagttacatctacgcgtcggatgacatccgtccggacgccctgaagggtgaagtcaagccggtggacaagacggccgtggagcgtctcgctggcgtccatgagttcgggatggagcccgatgtcattggtgcccgcgtgatcgaagcgatgaaggccaatcgcctgcacatcttcagccacccggaccacaaggaggaactgcgcgaagtcttcgatgagatcattgcggaataccaggactatcccaaggacccggggtacgaccagcgcgtcgcgttcgaaaaattccgtgcggactcgttcgccgaagcacgccgccaatcgcgcgccgccgacgagggccaccaccaccatcatcac

SEQ ID NO: 791 - protein, 310 aa, Artificial Sequence
  Description of Artificial Sequence: Synthetic polypeptide
MQNLPGKTAFVTGGASGIGLGIAKALLGAGMNVTIADIRQDHLDSAVAELGGGERVLAVKLDVTNRDQFAKAADATEAKFGKIHLLVNNAGVAVVGPTELATFADWDWVMGVNVNGTINGIVTILPRILAHGEGGHIVCTASMSALVPVAGTTIYSAGKAAVTAMMECMRPELEGRGVICSAFCPGAVQSNIADAAKTRPAELADTGYAEADKRRAAGGNFMHLYQTKEQVGERVLEGILNDELYILTHAEFLTGVEERGLATTAAVQTHLPENPEYKETFAALFRNPAITDEIARQNKLKETRKAGVEA

SEQ ID NO: 792 - DNA, 930 bp, Artificial Sequence
  Description of Artificial Sequence: Synthetic polynucleotide
atgcagaacctgccgggcaagaccgccttcgtgaccggcggcgcatccggcatcggcctgggcatcgccaaggcgttgctgggtgccggtatgaacgtcaccatcgcggacatccgccaggatcacctggactcggcggtagcggagctgggtggcggtgaacgcgtcctggccgtcaagctcgacgtcaccaaccgggaccagttcgcgaaggcagcggacgcgaccgaagccaagttcggcaagatccacctgctggtcaataatgccggggtggccgtggtcgggcctaccgagttggccacgttcgcggactgggactgggtaatgggcgtcaacgtcaacggcacgatcaacggcatcgtgaccatcctcccgcgtatcctggcccacggcgagggcggccatatcgtatgcacggcgagcatgtccgcactggtaccagtcgccggcactaccatctacagcgccggcaaggctgcggtgaccgcaatgatggaatgcatgcgtccggaactggaaggccgtggcgtgatctgttcggcgttttgtccgggggcggtccagtccaatatcgccgacgccgccaaaactcgccctgcggagctggcggataccggctatgcggaagcagataagcgccgggcagccggcggcaacttcatgcatctgtatcagaccaaagagcaggtcggcgaacgggtgctggagggcattctgaatgacgagctctacatcctgacgcatgccgagttcttgaccggcgtggaggagcgcggcctggcaaccaccgccgccgtccagacccatctgcctgaaaaccccgaatacaaggaaacgttcgccgccctgttccgcaatccggcgatcacggatgaaatcgcccggcaaaacaagctgaaggagactcgcaaggccggggtagaggcc

SEQ ID NO: 793 - protein, 289 aa, Artificial Sequence
  Description of Artificial Sequence: Synthetic polypeptide
MDIAGTTAFITGGASGIGFGIAQRLLANGARLVLADIRQDHLDEARQFFEERQQGRNVHTIRLDVSDRAQMAEAARECEAVMGGPDILINNAGIDPSGPFKDATYQDWDYGLAINLMGPINGIMAFTPGMRARGRGGHIVNTASLAGLTPMPSFMAIYATAKAAVITLTETIRDSMAEDNIGVTVLMPGPIKSRIHESGQNRPERFRAGSGLAETEQQLAKRVVADNWMEPTEVGDMIVDAIVHNKLYVSTHGNWRETCEARFQALLDSMPEARPFDFGASLAVPKEEA

SEQ ID NO: 794 - DNA, 867 bp, Artificial Sequence
  Description of Artificial Sequence: Synthetic polynucleotide
atggacattgccggcaccaccgctttcatcaccggcggtgcatccggcatcggtttcggcatcgcccagcgcctgctggcaaacggcgcgcgtctggtgttggccgatatccggcaggaccacctggacgaagcccgccagttcttcgaggagcgccagcagggccgcaacgtccacactattcgcctggacgtaagcgaccgcgcgcaaatggcggaggccgcgcgcgaatgcgaggccgtcatgggcggccctgacattctgatcaacaacgcgggcattgacccctccggacccttcaaggacgcgacctatcaggactgggactacggcctggccatcaacctgatggggccaatcaacggcatcatggcgttcacccctggcatgcgggcgcggggacggggtggccatatcgtgaacaccgccagcttggcgggcctgaccccgatgccatcgtttatggccatctatgccaccgccaaagccgcggtgatcaccctgaccgagaccatccgcgattcgatggcggaggacaacatcggcgttacggtcctcatgccgggccctatcaagtcgcgtatccacgagagcggccaaaatcgtccggagcgtttccgcgcaggctcgggcctggccgaaaccgaacagcagctggcgaagcgcgttgtcgccgacaattggatggaacccaccgaagtcggcgacatgatcgtcgacgccatcgtgcacaacaagctgtacgtcagcacccatggtaactggcgtgaaacctgtgaggcccggttccaggccttgctggactcgatgccggaggcccgtccgttcgactttggcgccagcctggccgtgcccaaggaagaagcg

SEQ ID NO: 795 - protein, 311 aa, Artificial Sequence
  Description of Artificial Sequence: Synthetic polypeptide
MQDLQGKTAFVTGGASGIGLGIAKALLGAGMNLTIADIRQDHLDEAVAELDGGGRVLAIKLDVTDREAFAAAADRAEAKFGKIHMLLNNAGVAVVGPTDLATYADWDWVMGVNLGGAINGIVTILPRILAHGEGGHIVNTASMSALVPAAGTTIYSSGKAAVVSMMECMRPELESRGVICSAFCPGAVQSNIAEAGKTRPEELSATGYAEADKRRQSGDQFFHLYQTKEEVGQRVLRGIVNDELYILTHSEFLDGVRERGEATTAAVQTHLPENEEYKRTFAILFRNPAIADEIERQTALRADQLSEISAA

SEQ ID NO: 796 - DNA, 933 bp, Artificial Sequence
  Description of Artificial Sequence: Synthetic polynucleotide
atgcaggacctgcaaggcaagaccgcattcgttaccggcggcgccagcggtatcggcttgggaatcgccaaggcgctgctgggcgccggcatgaatctcactatcgcagacattcggcaagaccatctggacgaagccgtggccgagctggacggtggcggccgtgtcctggcgatcaagctggacgtcaccgaccgcgaggcattcgctgcggcggcggaccgcgcggaagctaagttcggcaaaatccacatgctgctgaacaacgcgggcgtggcggtcgtgggccccaccgacctggccacctacgcggattgggattgggtgatgggcgtgaacctgggcggtgcgatcaacggaatcgtcaccatcctgccccgcatcctcgcgcacggcgaaggcggtcacatcgttaacacggcctccatgagcgccctcgtcccagcagctggcaccacgatctactcctccggaaaggcggccgtcgtctcgatgatggagtgtatgcgtccggaactggaatcgcgcggcgttatctgctcggccttttgtccgggggcggtgcagagcaacatcgccgaggcgggtaaaacccggccagaggaactgtccgccaccggctacgccgaggcagataagcggcgccaaagtggcgaccagttcttccacctgtatcagacgaaggaggaagtcggccaacgggtgctgcgcgggatcgtgaacgacgagctctacatcctgacccatagcgagttcctcgacggcgtgcgcgaacgcggcgaagcgaccaccgctgccgtgcagacccacctcccggaaaacgaagagtataagcggaccttcgccatcctgttccgcaatccagctatcgcggacgagatcgagcgtcaaacggccctgcgcgcagaccaactgtcggaaatctcggcggcc

SEQ ID NO: 797 - protein, 299 aa, Artificial Sequence
  Description of Artificial Sequence: Synthetic polypeptide
MRTIAGKVAFVTGGASGIGLGIAEALLDHGAKVMIADLRQDHLDEALARFGGRGDVAAIAVDVIDREAMARAAERTFDAFGRCDILVNNAGVGVNPSIDSVRFEDWDWVLSVNLGGAINGLMAFLPAMLRRGEGHVVTTSSMAGLLPTANNYIYAASKYAVRGMSDSLRLTLAPRGIGVSVLYPGLTRSRMLASAENRQARFGPTISAAPEGGPVAPPKESGMDPREVGEAVVQGIIENRGYILSHSEFRDELAAHFEDILAACPPPQDIDPGRQMLEDARRNQTAEAMRAVEALSARL

SEQ ID NO: 798 - DNA, 897 bp, Artificial Sequence
  Description of Artificial Sequence: Synthetic polynucleotide
atgcgcaccatcgcgggcaaggtcgcgttcgtcaccggcggcgcgtccgggatcgggctggggatcgccgaagctctgctggatcatggcgccaaagtgatgatcgcggacctccgccaggatcatctggacgaggcactggcccgcttcggcggtcgtggcgacgtggcggccatcgcggtcgatgtgatcgatcgggaggccatggcgcgtgccgccgaacggacgttcgacgcgttcggccgctgtgacatcttggtaaacaatgcgggcgtgggggtgaaccccagcatcgactccgtgcggttcgaagactgggattgggtcctgtccgtcaacctcgggggagccatcaacggcctcatggcctttctgccggccatgctccgccgtggggaaggccacgtcgtcaccacctcgtcgatggcgggcctgctccccaccgcaaacaactacatctacgccgccagcaagtacgcggtgcgtggcatgtcggactcgctgcgcctgaccctcgccccgcgcggaatcggtgtctccgtgctctatcccggcttgactcgttcccgcatgctcgctagcgcagaaaaccgtcaggcacgcttcggcccaactatctccgcagccccggaaggagggccggttgcgccccctaaggagtcgggcatggacccgcgcgaagtgggcgaggcggtcgtgcagggcatcatcgaaaatcgcggctacatcttgagccacagcgagttccgcgacgagctggccgctcactttgaagacatcctggccgcatgtccgccgccacaagatatcgacccggggcgccagatgctggaggacgcgcgccgcaaccaaaccgcggaggcgatgcgcgccgtcgaggcgctgtcggcccggctg

SEQ ID NO: 799 - protein, 305 aa, Artificial Sequence
  Description of Artificial Sequence: Synthetic polypeptide
MTGSTRDFTGKTAFITGGVNGIGFGIARAFALAGMDLILTYRKDEDRDDAARWLADNGLAPARFVRLDVTDRARFAQVAAEVGKVHVLVNNAGVSVFGPTDEASYDDYDWIMGVNFGGVVNGLVSFLPGMKAHGEGGHVVNVASMAAYLSGPQAGIYTASKFAVRGLTECLRYNLAPHGIGVSLMCPGLTRTNAWTSALKRPDSFAESGFKPADATELEQFGTAFELGMDPFEVGQKTLAGMIENRGLILTHGEFADDFEEIYRTSLAALPQEVIPEGRLHIEALRRAANKAAAEGQQIGLADLT

SEQ ID NO: 800 - DNA, 915 bp, Artificial Sequence
  Description of Artificial Sequence: Synthetic polynucleotide
atgactggaagcactcgggacttcactggcaagaccgccttcatcactggcggggtcaacggaatcggcttcgggattgcccgtgctttcgccctggcgggcatggacctcattctgacctatcgcaaggacgaagaccgtgacgatgccgcgcgctggctggcggataatggtctcgcccctgcccggttcgtacgcctcgatgtgactgaccgcgcccgcttcgcgcaggtcgcggccgaagtcggcaaggtgcacgtcctggtcaacaatgcgggcgtcagtgtcttcggtccgaccgacgaggcgagttacgacgactacgactggatcatgggcgtgaacttcggcggcgtggtgaacggcctggtctcctttctgcccggcatgaaggcgcatggcgagggcggccacgtcgtgaacgtggccagcatggccgcctacctgagcggaccgcaggctggcatttacaccgccagcaaattcgccgtgcgtggcttgaccgagtgcctgcgctacaacctggcccctcatggcatcggcgttagcctgatgtgcccgggtctgacccgcaccaacgcgtggaccagcgccctgaagcgccccgactccttcgcagagtccggtttcaaacccgcggacgccacggaactggagcagttcggcaccgccttcgagctcggaatggacccgtttgaggtcggccaaaagaccctcgccggcatgatcgaaaaccgcggcctcatcctgacgcatggcgagttcgccgacgactttgaagaaatctaccgcacgagcctggcagcgctcccgcaggaggtcatccccgaaggacgtttgcatatcgaagcgctgcgccgtgccgcgaataaggccgcagcggaggggcagcagattggcctcgccgatctgacc

SEQ ID NO: 801 - protein, 280 aa, Artificial Sequence
  Description of Artificial Sequence: Synthetic polypeptide
MGIETFAGRTAFVTGGASGIGLGIVKALARRDAFVVIADMRTDHISRALKALASAGLGESVAAVELDVTDRAAYASMARRMDEEFGGIDVLVNNAGVGVEGPILQATYPDWDFGLGVNLGGVVNGLQAMLPQMIAHGRGGHVVNTASLAATVVMPGHLAIYAAGKAAVLNLTENMRADLAGRGIGSSVLCPGFVRSNIHEAARNRPAHLREGSGFAASEQALSMRETGSEWMDPDAVGEMVADAILADQLYVITHGEFANRMRERAEALLAATPVCEMQF

SEQ ID NO: 802 - DNA, 840 bp, Artificial Sequence
  Description of Artificial Sequence: Synthetic polynucleotide
atgggcatcgagacgtttgccggccgtacggcgttcgtgaccgggggcgcgagcggcatcggcttgggtatcgtgaaagccctggcccgtcgcgacgcattcgtcgtcattgccgacatgcgcaccgaccacatttcccgcgcgctgaaagctctggcttcggccggcctcggcgaaagcgtggctgccgtcgagctggacgtgacggaccgggctgcctacgcgtccatggctcgccgcatggacgaggagttcggtggcatcgacgtgttggtcaacaacgcgggtgtgggtgtggaaggccccatcctgcaagccacctacccggattgggacttcggactgggcgtaaatctcgggggcgtcgttaacggcctccaagccatgctgccacagatgatcgctcacggtcgtggcggacacgtggtgaacaccgccagcctcgccgcgaccgtagtcatgcctggacatctggcgatctacgcggcgggcaaagcggccgtactgaacctgaccgaaaacatgcgcgcggacctggcgggacgtggcatcggaagctcggttctgtgtcccggctttgtgcgctcgaatatccacgaagccgcgcgcaaccgtccagcacacctccgtgaaggctccggattcgctgcctcggaacaggcgctgagtatgcgcgagaccggctccgagtggatggaccctgacgccgtcggcgagatggtagccgacgcgatcctcgcagaccagctgtacgttatcacgcacggcgagttcgcgaaccggatgcgcgaacgggccgaagccctgctggccgcaactccggtttgcgagatgcagttt

SEQ ID NO: 803 - protein, 275 aa, Artificial Sequence
  Description of Artificial Sequence: Synthetic polypeptide
MRTHPIQSGSLGLVTGGASGIGLGIAQALLEAGLQVIVTDVRDDHLEEAQTLLGSAGDQVHFLRLDVTDRPQWRAARRFVEERFGALHVLCLNAGVGVLGSMLEASDADWEWITSVNLDGVLAGVETFLPHMVAHGRPGHIVATSSMGGLIVANDGGVYSAAKFGVVALIEGLRRDLQGGSVGATVLCPSAVTTNIYDHERMRPTIFQHPDAVRDDQALEAMEAFHKQLLALGRNPVEVGRMVWNGIEADAPYVFTDRNVWPTLVSRRDALLAFA

SEQ ID NO: 804 - DNA, 825 bp, Artificial Sequence
  Description of Artificial Sequence: Synthetic polynucleotide
atgcgcacccatccgatccagagcggcagtctgggtctggttacgggcggggcctcgggcatcggcctgggcatcgcccaggccctgctggaggcgggcctgcaagtcatcgtcaccgacgtccgcgatgaccacctggaggaagcccaaaccctgctgggctccgccggggatcaggtacactttctgcggctggacgtgacggatcgcccccaatggcgtgccgcccgccggttcgtcgaggagcgctttggcgccctccatgtcctgtgtctgaacgcgggggtgggagtcctgggatcgatgctggaggcctccgatgcggattgggagtggattaccagcgtgaacctggacggcgtcctcgcaggcgtggaaaccttcctgccacacatggtcgcgcacggccgcccagggcatatcgtggctaccagctccatgggagggctgatcgtggccaacgacggaggcgtctatagcgcggcgaaattcggcgtggtcgccctgatcgagggactccggcgtgacctccaaggcggcagcgtgggcgcgaccgtcctgtgcccgtcggcggtaaccacgaacatctacgatcatgagcgcatgcgccccaccatcttccagcacccggacgcggtgcgggatgaccaggccctggaggccatggaagccttccataaacagttgctggccctgggccggaaccctgtggaggtcggccgcatggtgtggaacggcatcgaggcggatgccccttacgtgttcacggaccgcaatgtgtggccgaccctcgtgagtcgccgcgacgcgctcctcgccttcgcc

SEQ ID NO: 805 - protein, 289 aa, Artificial Sequence
  Description of Artificial Sequence: Synthetic polypeptide
MSGFSIEGRTAFVTGGASGIGLGIARALIGRGARVAVADVDGAAVGRAVEALSAAGRVEGVALDVRDRNGWQAARATVEAALGPVSLLVNNAGVTGYDPIVDTPPAHFDWIVGVNLTGAFNGVHCFGRAMIDRGEGGHILNTASIAGLYGSNALTVGAYAASKFGLVGLSERLRVELAPHGIGVSLLCPGLVSTAIGANAAKLRPGPAGMALADNPAFAGLRQRAPTAGLDPDRLGPFVVRAIEENRAYIIPHPHFAEQVEARHAALMADFGEPADPALPLAPDWRDLA

SEQ ID NO: 806 - DNA, 867 bp, Artificial Sequence
  Description of Artificial Sequence: Synthetic polynucleotide
atgagtggcttcagcatcgagggtcgcacggcgttcgtgaccgggggcgccagtggcattggtctgggcatcgcgcgtgccctcatcggccggggagcgcgggtggcggtcgccgacgtagatggcgcggccgtcggtcgcgcagtggaagccctgagtgccgccggacgcgtggagggcgtcgctttggacgtccgcgaccgcaatggatggcaagcggcccgggcgactgtggaagccgccctgggtcccgtaagcctgttggtgaataacgccggtgtcaccggttacgatccgatcgtcgacactcccccagcgcacttcgactggatcgtgggtgtcaatctgaccggagcgttcaacggcgtccactgcttcggccgcgcgatgattgaccggggcgagggcggccacatcctgaacaccgcctccattgcggggctctacgggtcgaacgccctcaccgtgggggcctatgctgccagcaagttcggcctcgtaggactgtccgaacgcctgcgcgtcgagctcgcccctcatggcatcggcgtctccctgttgtgtccgggcctggttagcaccgccatcggcgccaacgccgccaaactccggcccggtccggcggggatggcgctcgcggacaacccggcctttgcggggctgcgccaacgtgccccgaccgctggcctggacccggaccgtctgggaccgttcgtggtccgcgctatcgaggagaaccgcgcctacatcatcccccatccgcacttcgctgaacaggtcgaagcccggcacgccgcgctcatggcggacttcggcgagcccgccgacccggccctccctctggccccggattggcgggatctggcg

SEQ ID NO: 807 - protein, 294 aa, Artificial Sequence
  Description of Artificial Sequence: Synthetic polypeptide
MMRDLQGKTAFVTGGASGIGLSMARAFGAAGMNVMLADINEDDLGVAVAELNERQIKAAGVRCDVADRKSLEQAAEETVATYGKVHVVCNNAGVGAGGAIGTVKPGDWDWTIAVNLMGVVYGTEAFLPHIRAHGEGGHFVNTASMAGMISVPGMEPYTASKYAVVGMSEGWAGQLAPENIGVSVLCPGFVRTRIHESGRARQEKFGPAATDERDPARIEAAKQLVLGGLDPDRVGARVLEAIQANELYIFTHPDMAPLFEERARNIMAAFLRASESPALSGAAYQTPKEIKVFD

SEQ ID NO: 808 - DNA, 882 bp, Artificial Sequence
  Description of Artificial Sequence: Synthetic polynucleotide
atgatgcgcgacctccaaggtaaaacggcgttcgtaacgggcggcgccagcggcatcggcctgtccatggcgcgtgcctttggagcggcgggcatgaacgtcatgttggccgacatcaacgaagacgatctgggcgtggccgtggcggagctgaatgaacgccagatcaaggccgcgggggtccgctgcgacgtggccgaccgcaagtcgctggagcaggccgcggaagaaacggtggccacgtacggcaaagtccatgtggtctgcaacaacgcgggtgtgggggcaggcggagccatcggaacggtgaaaccgggcgactgggactggaccattgcggtcaacctcatgggcgttgtgtacggcacggaagcctttctgcctcacatccgcgcgcacggcgagggagggcacttcgtgaacaccgctagcatggccggcatgatctcggtcccaggcatggaaccgtacaccgcgtcgaagtacgcggtggtgggcatgagtgagggctgggccggccagctcgctccggagaatatcggcgtcagcgtcctgtgcccgggtttcgtccggacgcgcatccacgaatcgggtcgtgcgcgccaggagaagttcgggcccgcagcgaccgacgaacgcgatccagcgcgcatcgaagccgctaaacaattggtcctgggcggcctcgacccagaccgcgtgggagcgcgcgtgctggaagccatccaggccaatgagctctacatcttcacccatcccgatatggcgccgctcttcgaggaacgcgcgcggaatatcatggctgccttcctccgcgcctcggaaagccccgccctctcgggcgcggcgtaccagacgccgaaggagatcaaggtgttcgac

SEQ ID NO: 809 - protein, 273 aa, Artificial Sequence
  Description of Artificial Sequence: Synthetic polypeptide
MTDIADRTAFITGGANGIGLGIARSLAQAGARLALVDLDAAALARAEMELCAITDVFTAVLDVRDRDGYARVADEAEAKLGPVSILINNAGVSGGTRASRLTYELWDWGIGINLGGVINGVQTFLPRIIERGGGGHIVNTASGAGLVPPVREGSTLYTTAKYAVVGMSEALGLELESQGIGVTVLCPGPVATGIIERALASRAAISEPISAEQLSKTEAMKTYLANGMSPDAVGDMVREAIYKNRLYVHTHREVIGRIEARTKALLDAMPREA

SEQ ID NO: 810 - DNA, 819 bp, Artificial Sequence
  Description of Artificial Sequence: Synthetic polynucleotide
atgaccgacatcgccgaccgcaccgcgttcatcaccggcggcgccaacggtatcggattgggcatcgcgcgctccttggcgcaggcaggggcacgcctcgccttggtagatctggacgccgcagccctggcccgcgcggagatggaactgtgcgccatcaccgatgtcttcaccgccgtgctggacgtgcgcgaccgcgacggttatgcacgggttgccgacgaggccgaggcgaagctgggaccagtcagcatcctgatcaacaacgcgggcgtgtcgggcggtactcgtgcgtcccggctcacctacgagctgtgggactggggcatcggtatcaacctgggtggcgtgatcaacggcgtccagaccttcttgccccgcatcatcgagcgtggaggcggtggccatatcgtgaacaccgctagtggtgccggcctcgtcccgccggtacgggagggcagcaccctgtacaccaccgccaaatacgctgtggtaggcatgagcgaagccctgggtctcgaactggaaagccaagggatcggcgtaaccgtcctctgcccgggccccgtggcgacgggtatcatcgagcgtgcgctggccagccgtgccgcgatctcggaaccaatcagtgccgagcagctgagcaaaaccgaagccatgaagacttacctcgccaacggtatgtcccccgacgctgtcggcgatatggtgcgcgaggccatctacaagaaccgcctctacgtgcacacccatcgggaagtgatcggccgtatcgaagcccgtaccaaggcgctgttggacgccatgccgcgtgaggcc

SEQ ID NO: 811 - protein, 273 aa, Artificial Sequence
  Description of Artificial Sequence: Synthetic polypeptide
MTDVQGRTAFITGGANGIGLGIARSFARAGAKLALADVDAAALARAKAELRGMTPVETYQLDVRDRDAYASTAEAVERSLGPVSLLFNNAGVAGGTSAGKLTYESWDWYIGVNLNGVINGIQTFLPRMIERGEGGHIVNTASGAGLVATTSGVLYTTAKFGVVGMSEALNLDLAAAGVGVSVLCPGPVATDIIQRSAAAAPTTGTPLADEERRQGAERIAEAIEYLNQGVSIDDVGEMVLKAVRDNALYVHTDRSAAKLIQVRTKALLDAMPD

SEQ ID NO: 812 - DNA, 819 bp, Artificial Sequence
  Description of Artificial Sequence: Synthetic polynucleotide
atgaccgacgtacagggccgcaccgcgttcatcacgggaggcgcaaatggcatcggcctgggaatcgcgcgcagctttgcgcgtgccggcgcaaaactggccctggccgacgtcgacgcagcggccctggcccgtgcgaaagccgagctccgcggcatgactccggtggagacctatcaactggatgtgcgggatcgcgacgcgtatgcaagtacggcggaagccgtggagcgttcgctgggtccggtgtcgctgctgttcaacaacgcgggtgtggcgggcgggacctcggccggcaagctcacctacgagagctgggactggtacatcggtgtgaacttgaacggcgtcattaacggtatccagaccttcctcccgcgcatgatcgagcggggcgagggcggccacatcgtcaacaccgccagcggggcgggcttggtggcaaccacgtccggcgtcctgtataccaccgccaagttcggtgtggtgggcatgagtgaagcgctgaacttggatctggcagccgccggcgtcggagtgtccgtgctgtgccctgggcccgtcgcaaccgacattatccagcgcagtgcggctgccgcgcctaccaccggcactcccctcgcggacgaggaacggcgtcagggcgccgagcgcatcgccgaggcgatcgagtacctgaatcagggcgtttccatcgacgatgtcggcgagatggtcctgaaggccgtgcgtgacaatgccctgtatgtccataccgaccgtagcgccgccaaactcatccaggttcgtaccaaggccttgctcgatgcgatgccggat

SEQ ID NO: 813 - protein, 311 aa, Artificial Sequence
  Description of Artificial Sequence: Synthetic polypeptide
MLDVSGKTAFITGGASGMGWGMAKAFGEAGMKVIIADIRQDALDQAMEGFSKTNLAVHSILLDVTSRDGWARAADEAEERFGNIHVLALNAGVGTGGSMLTATYKDWDFNMGVNVGGVVNGLVTMLPRMLAHGEEGQLVVTSSTGGFSAVGGAGLYCAAKYCVAGMFESLATDLRGTALGASVFFPGPVQTQLGISTQATRPEHLRNEAPPPPPASVGAQQDKRPAPGFDPSLFMTSEEVGQRVLRGIRRRDLFIMTHPEFTKGIEARNNALLRAIPVEAPNEARANLVAQFGTLMYNPIYDGQQPLDEPL

SEQ ID NO: 814 - DNA, 933 bp, Artificial Sequence
  Description of Artificial Sequence: Synthetic polynucleotide
atgttggacgtgagcggcaaaaccgccttcatcaccggcggggcctcgggcatgggctggggcatggctaaggccttcggcgaggccggcatgaaggtcatcatcgcggacatccgtcaagacgcgctggaccaagccatggaaggcttctcgaaaaccaacctcgccgtgcattccatcttgctggacgttactagccgcgacggctgggctcgcgccgccgacgaggcggaggaacgcttcggcaacattcacgtgctggccctgaacgcgggtgtcggcaccggtggcagcatgctcacggccacctacaaggactgggacttcaacatgggcgtgaacgtgggcggagtcgtgaacggcctggtgaccatgctgccgcgcatgctggcccatggcgaagagggccagctggtggtaaccagcagcacgggcggcttctccgcggtcggcggtgccggcctgtactgtgctgcgaagtactgtgtggccggcatgttcgagtccctggccaccgacctgcgcggcaccgccctgggcgcaagcgtattcttcccgggcccagttcaaactcagttgggcatctcgacccaggcgacgcggccggaacatctgcgcaacgaggcgcccccgcctccgcctgcaagcgtcggcgcgcagcaggataagcgccccgcgcctgggttcgaccccagtctgttcatgacctcggaagaggttggccagcgggtgctccgcggcatccgccgtcgtgacctgttcattatgacccacccggagttcaccaagggtatcgaggcccggaacaacgctctgctgcgggccatcccggtggaggcacccaatgaggcccgggcgaacctggtggcgcagttcgggacgctgatgtataacccaatctacgacggccagcagccgctcgacgaaccgttg

SEQ ID NO: 815 - protein, 280 aa, Artificial Sequence
  Description of Artificial Sequence: Synthetic polypeptide
MDGFLSGFDGRAAVVTGGASGIGLATATEFARRGARLVLSDVDQPALEQAVNGLRGQGFDAHGVVCDVRHLDEMVRLADEAFRLLGGVDVVFSNAGIVVAGPLAQMNHDDWRWVIDIDLWGSIHAVEAFLPRLLEQGTGGHIAFTASFAGLVPNAGLGTYGVAKYGVVGLAETLAREVKPNGIGVSVLCPMVVETKLVSNSERIRGADYGMSATPEGAFGPLPTQDESVSADDVARLTADAILANRLYILPHAAARESIRRRFERIDRTFDEQAAEGWTH

SEQ ID NO: 816 - DNA, 840 bp, Artificial Sequence
  Description of Artificial Sequence: Synthetic polynucleotide
atggacggcttcttgagtgggttcgatggccgggccgccgtggtcacgggcggtgcgagcgggatcggcctggcgaccgctactgagttcgctcggcgtggagcccgcttggtactgagcgacgtcgaccagccggcactggaacaggcggtcaacggcttgcgcggccaggggttcgacgcccatggcgtggtctgtgatgtacgccacctggacgagatggtgcggctggcggacgaggccttccgtctcctcggtggggtcgacgtcgtgttcagcaacgcgggcattgtagtagcgggccccctggcccagatgaatcatgatgactggcgctgggtcatcgatattgacctgtggggcagcatccacgccgtggaggccttcttgcctcggctcctggagcagggcaccggcggccatatcgccttcaccgcgagcttcgccggcctcgtccccaatgccggcctcgggacctatggcgtcgccaagtatggcgtagtcggcttggcagagaccctcgctcgcgaggtgaaacccaacggaatcggggtgagcgtgctgtgccccatggtcgtcgaaacgaagctggtcagcaactcggaacgcatccgcggcgctgactacggcatgagcgcgactccggagggtgcgttcggacccctccccacccaagacgaatcggtgtcggccgacgacgtggcccggctgaccgccgacgccatcctggccaaccggctgtatattctgccgcatgccgccgcccgcgaaagcatccgccgccggttcgagcgcattgaccgcaccttcgatgagcaagccgccgaaggctggactcac

SEQ ID NO: 817 - protein, 279 aa, Artificial Sequence
  Description of Artificial Sequence: Synthetic polypeptide
MDGFEGRGAVITGGASGIGLATATEFARRGARVVLADVDESALERAVAQLKAEGFDAHGVTCDVRHLDQMVHLADESFRLLGQVDVVFSNAGIVVAGPLATMTHEDWRWVIDIDLWGSIHAVEAFVPKLIEQGSGGHIAFTASFAGLVPNAGLGAYGVAKYGVVGLAETLAREVRDNGIGVSVLCPMVIETGLVANSERIRSADDGLASAPDLTSGFGQFPPTQDDTVSVDGVARLTADAILANRLYILPHEAARASVKRRFERIDRTFDEQAAEGWTH

SEQ ID NO: 818 - DNA, 837 bp, Artificial Sequence
  Description of Artificial Sequence: Synthetic polynucleotide
atggacggcttcgaaggccgtggggctgtgatcactggtggcgcaagcgggattggcctggctaccgcgaccgagttcgctcgtcggggcgctcgcgtagtgctggcggacgttgacgaaagtgcgctggagcgcgccgtggcccagctcaaggcggagggtttcgatgcgcacggcgtaacctgcgatgtccgccatctggaccagatggtgcacctggcggacgagtccttccgtctgctgggccaggtggacgtagtgttttcgaacgccggcatcgtcgtcgccgggcctctggccaccatgactcatgaggattggcgctgggtgatcgatatcgacctgtggggctccatccatgcggtcgaggccttcgtacccaaactcatcgaacaaggctcgggcggccacatcgccttcaccgcgagcttcgccggtctggtgccgaacgcgggcctcggtgcgtatggcgtcgccaaatacggggttgtggggctggccgaaaccctggcgcgggaagtccgcgacaacggcatcggcgtatccgtcctctgcccgatggtgatcgaaactggcctcgtcgccaatagcgagcgcatccgctccgctgacgacggcctggcaagtgccccagacctgaccagcggtttcggtcaatttcccccgacgcaagacgacacggtctcggtcgacggcgttgcgcggctcaccgccgacgccatcctggcgaatcgcctgtacatcctgccacacgaagcggcccgcgcctccgtgaagcgccgctttgagcgcattgatcgtaccttcgacgaacaggccgcggaaggctggacgcac

SEQ ID NO: 819 - protein, 276 aa, Artificial Sequence
  Description of Artificial Sequence: Synthetic polypeptide
MNNFENTVGFITGGAAGIGLGVGRALGRQGMTLVLADVEAHTLDKAAEELRAEGIKVHTEVLDVRDADAYREVAKRTLAEHGKVNFLFNNAGVGGGHFPAGETPLQDWQWVVDVNLMGVVYGVEFFLPAMRALGEPCYIINTASLAGHVANPGMAAYCATKFAVVGYSEALRHELQGSAIEISVLCPAWVKTRIAQSRRNHPDGEEAANAMGGSEGMNKVDEIIANEGISVEALAERVVGGMATGTFYLFTHPDFWPAVQERLQRITQDYQEVMPG

SEQ ID NO: 820 - DNA, 828 bp, Artificial Sequence
  Description of Artificial Sequence: Synthetic polynucleotide
atgaacaacttcgagaacaccgtcggctttattaccggcggggctgcgggcatcggcctgggcgtaggacgcgcattgggccgccagggcatgacgctggttctcgccgacgtggaggcccataccctcgacaaagcggccgaggaactccgcgccgaaggcatcaaagtccacacggaggtcctggatgtgcgcgatgccgatgcctaccgcgaggtcgccaagcgcaccctggccgagcacggaaaggtgaacttcctgttcaataacgcaggggttggcggcggacacttcccggccggcgaaacccctctgcaggactggcagtgggtcgtggatgtgaatctgatgggcgtcgtctacggcgtggagttcttcctcccggcgatgcgcgccctgggtgaaccttgctacatcatcaacaccgcctcgctggccggtcatgtcgctaacccaggcatggccgcctattgtgctaccaaattcgccgtggtcggatacagcgaggccctgcggcacgaactgcagggcagcgccatcgagatctcggtgctgtgtcccgcctgggttaagactcgcatcgcgcagtcccgtcgtaaccacccggacggggaagaggcagcgaacgccatgggcggctcggagggcatgaacaaggtcgacgagatcatcgccaacgaaggaatctccgtggaggccctggcggagcgcgtggtcggcggtatggccaccggcacgttctacctgttcacccaccccgatttctggccggcggtgcaagaacgcctgcagcggatcacccaggactaccaagaggtcatgccgggc

SEQ ID NO: 821 - protein, 290 aa, Artificial Sequence
  Description of Artificial Sequence: Synthetic polypeptide
MTEVQGRTAFITGGAHGIGLGIARALAADGVKVALADLDANALSLCKAELASITEVETVRLDVRDRQGFVEAIDHVEESLGPVTLLINNAGVAGSGDIDDLDYALWEWNIGINLWGVINGIQSVLPRMRARGLGGHVINTASASGLVGGTATMAYCTAKAGVVGLSESLRTELKGSGIGVSVLCPGPVATSILTHSAENLASVSVSRPVPSAERRDAQMSNVLEKAIQPDEVGRRVLAAIRANQFYIHTDRVMLQALEDRHREIVDAMPDEEMSLFTAELSAAFSRRRAS

SEQ ID NO: 822 - DNA, 870 bp, Artificial Sequence
  Description of Artificial Sequence: Synthetic polynucleotide
atgacggaagtgcaggggcgcacggcattcattaccggcggcgcccatggcatcggcctcggcatcgcgcgtgctctggccgccgatggcgtgaaagtcgccctcgccgatctggacgctaacgcgctctcgctgtgcaaggccgaactggcgagcatcaccgaggtggagactgtgcgcctggacgtccgcgaccgccagggcttcgtggaagccatcgaccacgtggaagaaagcctgggccccgttaccctgctgatcaacaacgcgggtgtcgcgggctcgggggacattgatgatctggactacgccctgtgggagtggaacatcgggatcaatctgtggggcgtcatcaacggcatccagagcgtgctgccccgcatgcgcgctcgcggtctgggtggacacgtcatcaacaccgccagcgctagtggcctggtcggcggaaccgcaaccatggcctattgcaccgcaaaggccggtgtggtcggcctgagcgagagtctccgtaccgagctgaagggcagcggcatcggcgtcagcgtcctgtgtcccggtcccgtggcgacctccatcctgacgcacagcgccgaaaatctggcctccgtgagcgtctcccgtcccgtaccatccgcggaacgccgcgatgcccagatgtccaacgtcctggagaaggcgatccagcctgacgaagtgggtcgccgggttctggccgccatccgggcgaaccaattttacatccacaccgaccgcgtcatgctccaagccctcgaagaccgccaccgcgagatcgtggacgcaatgccagacgaagaaatgagtctgttcaccgcggaactgtccgccgcgttttcccgtcgccgggctagc

SEQ ID NO: 823 - protein, 322 aa, Artificial Sequence
  Description of Artificial Sequence: Synthetic polypeptide
MVQVHTSMREVAGKVAFITGGSSGIGLGIARAFINAGMKVAFSYRTRAHLDRAMGFFRGKEQRVHAINVDVTDRPGMARAAEETVRRFGKVHVLVNNAAVGMITGLVDATFDDWDWVTGVNIDGVFNGIRAFLPLIRAHGEGGHVVSTSSMGGLVVAKGTVYSTTKFAVVGMMEGLRAELYDTNIGVSVYCPGGVNSNIRHSDRNRPERLSASGFTPASEEPAFPDGLRERYPDPGGDGRCMDPLEAGEWVLHGIRNNLMYILSHPEFEPTVRDRAEALLASFTSGGRAVPQARLDDEREILRPKMYVIERERALRSGSCSD

SEQ ID NO: 824 - DNA, 966 bp, Artificial Sequence
  Description of Artificial Sequence: Synthetic polynucleotide
atggtgcaggtgcacacctccatgcgcgaagtcgcaggcaaggtcgccttcatcaccggcgggagcagcggtatcggactcggtatcgcgcgtgctttcatcaatgccggcatgaaggtggccttcagctaccgcacccgcgcccacctggatcgcgctatgggcttcttccgcggcaaggagcaacgtgtgcatgcgatcaatgtggacgtcaccgatcggccaggcatggcccgtgcggctgaggaaaccgtgcggcgcttcggcaaggtccacgtgttggtgaacaatgcggcagtgggcatgatcaccggcctggtcgacgcgacgttcgacgattgggactgggttacgggcgtcaacatcgacggcgtcttcaatggcatccgggcgtttctgccgttgattcgcgcccacggcgagggtggccacgtggtaagtaccagctccatgggcggcctggtggtcgccaaggggaccgtctatagcaccactaaattcgccgtggtgggcatgatggagggcctccgcgccgagctgtacgacaccaacatcggcgtgtccgtctattgtcccggcggcgtgaatagcaacatccggcattccgaccggaatcgtcccgaacgcctcagcgcgtcgggcttcaccccggccagtgaagagcccgctttcccagacggcctgcgtgagcgttaccccgaccccggaggtgacggtcgttgcatggaccccctggaagcgggcgaatgggttctgcatggcatccgcaacaacctgatgtacatcctgtcccacccggagttcgagccgaccgtccgcgatcgcgcggaagccctgttggcgtccttcaccagcggaggccgtgccgtgccgcaagcccgcttggatgacgagcgcgagatcctgcggcccaagatgtacgttatcgagcgggagcgggcgctccgctccgggtcctgctcggac

SEQ ID NO: 825 - protein, 292 aa, Artificial Sequence
  Description of Artificial Sequence: Synthetic polypeptide
MKEFSNRVAVITGAGSGFGREFARIAAARGMRLALADIQPDALEAIAAELRAAGAEVLAERVDVSNAEAMERFADSVFAQYGNAHLLFNNAGVGGGGLLWEHSVRDWQWVLGVNLWGVIHGVRCFVPRMIANGDEGHIVNTASVAGLISAQTMGVYNVSKHGVVTLSETLFQDLRISGSILGVTVLCPAFVDTGIKDAARNRPAELANDAPPTASQRLAEEQTRKAVTSGRIGAPEVAARTFECIEEGRFYCLTHPKILGAVELRMQDLLNQRDPSDPFSLKREVAFKAPQN

SEQ ID NO: 826 - DNA, 876 bp, Artificial Sequence
  Description of Artificial Sequence: Synthetic polynucleotide
atgaaagagttctccaaccgtgtggcggttatcacgggcgcgggtagtggcttcggtcgggagttcgcacgtatcgccgctgctcgcggcatgcggctggccctggccgatatccagcccgacgctttggaggcgatcgcggccgaactgcgggctgctggtgccgaagtgctggccgagcgcgtcgatgtcagcaacgccgaggccatggagcgtttcgccgactcggtgttcgcccaatacggcaacgcccatctcctcttcaacaacgccggggtcggcggcggtggcctcctgtgggagcatagtgtacgcgactggcaatgggtcctgggtgtgaatctgtggggcgtgattcatggcgtccgctgcttcgtcccccggatgatcgcgaacggagacgagggccacatcgtcaacacggccagcgtggccggattgatttcggcacaaaccatgggcgtctataacgtctccaagcacggcgtcgtcacgctgagcgagaccctcttccaggatctccgcatcagcgggagcatcctcggagtgaccgtgctctgcccggccttcgtcgacaccggtatcaaagacgcggcccgcaaccgcccggcggaattggcgaatgatgcgcccccgaccgcctcccagcggctggcggaggagcagacccggaaggcggtgacgtcgggccggatcggcgcccctgaggtcgcggcccggacgttcgagtgtatcgaggagggccggttctactgcctgacccaccccaagatcctgggggccgtcgaactgcgcatgcaggacctcctcaaccagcgcgacccctccgacccgttcagcctgaaacgcgaggtggcgtttaaggcgcctcaaaac

SEQ ID NO: 827 - protein, 292 aa, Artificial Sequence
  Description of Artificial Sequence: Synthetic polypeptide
MKEFSNRVAVITGAGSGFGREFARIAAARGMRLALADIQPDALEAIAAELRAAGAEVLAERVDVSNAEAMERFADAVFAQYGNAHLLFNNAGVGGGGLLWEHSVRDWQWVLGVNLWGVIHGVRCFVPRMIANGDEGHIVNTASVAGLISAQTMGVYNVSKHGVVTLSETLFQDLRISGSILGVTVLCPAFVDTGIKDAARNRPAELANDAPPTASQRLAEEQTRKAVTSGRIGAPEVAARTFECIEEGRFYCLTHPKILGAVELRMQDLLNQRDPSDPFSLKREVAFKAPQN

SEQ ID NO: 828 - DNA, 876 bp, Artificial Sequence
  Description of Artificial Sequence: Synthetic polynucleotide
atgaaagagttctcgaaccgcgtggccgtgatcactggggccggcagcgggttcgggcgcgagtttgcccgcatcgctgccgcccggggaatgcggctcgccttggccgatatccagccagatgccctggaagcgattgcggcggagctgcgtgcggcgggcgcggaagtgctggccgaacgcgtggatgtcagtaacgccgaagcgatggagcgcttcgcggacgccgtcttcgcccagtatggcaacgcccatctgctcttcaacaacgcgggcgtgggcggcggaggcctgctgtgggaacacagtgtacgcgactggcaatgggtcctgggcgtcaacctgtggggcgtcatccacggggtgcgctgcttcgtgccgcggatgatcgccaacggcgacgaggggcatatcgtcaataccgcctcggtcgcgggcctgatcagcgcacagaccatgggcgtctataacgtgtcgaagcacggtgtcgttaccttgtcggaaaccctgttccaagacctgcgtatctccgggagcatcttgggcgtgaccgtgctgtgtcccgccttcgtcgacactggcatcaaagatgcggcgcgcaaccgtccggcggagctcgcgaacgacgccccacccacggcgtcgcagcggctggcggaggaacagacccgtaaagccgtgacgtccgggcgcatcggcgccccagaagtggccgcccgcaccttcgaatgcatcgaagagggacgcttctactgcctgacgcaccccaagatcctgggcgctgtcgaactgcgcatgcaggacctgctgaaccagcgcgatccatcggacccgttctccctcaaacgcgaggtcgcgttcaaggccccgcaaaac

SEQ ID NO: 829 - protein, 297 aa, Artificial Sequence
  Description of Artificial Sequence: Synthetic polypeptide
MKDFDGKIAFVTGAASGIGLGITRAFVAKGMKVMMADIEAGPLESAVASLREQGADVAGVICDVSDVEAVKLAAEKTIETFGKVHVIVNNAGVGGGGGETGTIPIEDWKWTVDVNLMGVVYGCEIFVPLIKEHGEGGYIINTASLAGQVGTVGMGPYNATKFAVVGYSESMNSELVPQGIGVAVLCPAWVNTQIAESRRNHPAGTDQSEVQNSADEELKNTVNEAISNGMSADTVGKWVVESMEQDALYIFTHPNWKVVIEAKTSRLLQAHDAAAESAILRADKGSLSGPLSDILPE

SEQ ID NO: 830 - DNA, 891 bp, Artificial Sequence
  Description of Artificial Sequence: Synthetic polynucleotide
atgaaggacttcgatggcaagatcgcgttcgtcactggcgcagccagtgggatcggcctgggaatcacccgcgcctttgtagccaaggggatgaaggtgatgatggccgatatcgaagcgggccctctggagtcggccgtagccagtctgcgtgaacagggcgcagatgtggcaggtgtgatctgcgatgtttcggatgtcgaagcggtgaagctggccgccgagaagactatcgaaacctttggcaaggtccatgtcatcgtcaataacgctggtgtgggcggcggtggtggcgaaaccgggaccatccccatcgaagattggaagtggaccgtcgacgtgaacctgatgggtgtcgtgtacggctgcgagatcttcgtgcccctgatcaaagaacacggcgagggcggctacatcatcaacaccgccagtttggccggccaggtcggcaccgtcggtatggggccgtacaatgcgaccaagttcgcagttgtcggctactccgaaagcatgaactccgagctcgtgcctcagggtattggcgtggccgtgctctgtccggcgtgggtcaatacccaaatcgcggaatcgcgccggaaccatcctgctgggacggaccagtcggaagtgcagaactccgccgacgaagagctcaagaacacggtaaacgaggccattagcaacggcatgagcgctgacacggtcgggaagtgggtggtcgaatcgatggagcaggatgcgctgtacatctttacccaccccaactggaaggtcgtcatcgaggcgaagaccagccgtctgctgcaggcccacgacgctgctgcggaaagcgccattttgcgtgccgacaaagggtcgctcagcggccccctgtcggatattctgccggaa

SEQ ID NO: 831 - protein, 249 aa, Artificial Sequence
  Description of Artificial Sequence: Synthetic polypeptide
MKVMLADVEADALAAAVNSLHNVGPGVRGIDCDVADAAGVERAAKATFDAFGNVHIVCNNAGVAAGGGIDEIALDSWRWVIDVNLMGVVHGIRAFLPHMRAHGEGGHIVNTASMAGMQSGLGFSPYTASKFAVVGMSEGLAPQLAPFGIGVSVLCPGFVRTRIGESGRNRPDQYGAAQVPEPGSATAMLVAMVDEMIGNGIDPADVAARVLAAIRANELYVFTHPEMRTEVENRFTAITTAFDRAAAPV

SEQ ID NO: 832 - DNA, 747 bp, Artificial Sequence
  Description of Artificial Sequence: Synthetic polynucleotide
atgaaggtcatgctggcggacgtagaggcagacgcactggccgccgccgtgaacagcctgcacaatgtggggccgggcgtgcgcggtattgactgcgatgttgcagacgccgcgggcgtggaacgcgctgccaaagccacgttcgacgcattcggcaacgtgcacatcgtctgcaacaatgccggcgtcgcggcgggcggagggatcgacgaaatcgccctggactcgtggcgctgggtcattgacgtcaacctgatgggtgtcgtccatggcatccgcgccttcctgccccacatgcgggcccatggggagggaggccacatcgtgaacacggcctcgatggccggcatgcaaagcggcctgggcttcagcccctacaccgccagcaagtttgccgtggtaggcatgtcggaaggcctggccccgcaactggcgcccttcggcatcggcgtctccgtgttgtgcccgggcttcgtgcgcacgcgtatcggcgagagcggccgtaaccgccctgatcagtacggtgccgcgcaagtccctgaacccgggtcggctaccgccatgctggtcgcaatggtggacgagatgattggcaacggcattgatccggccgatgtcgcggcccgggtactggcggcgatccgcgccaacgagctctatgtgttcacccaccccgaaatgcgcacggaggtcgagaaccgcttcactgcgattactaccgcattcgatcgcgccgcggcccccgtc

SEQ ID NO: 833 - protein, 276 aa, Artificial Sequence
  Description of Artificial Sequence: Synthetic polypeptide
MDGFAGRGAVITGGASGIGLATATEFARRGAKVVLADIDKPGLERSVEHLRGKGFDAHGVMCDVRHLSEVNHLAAESARLLGQIDVVFSNAGIVVAGPIADMTHDDWRWVIDIDLWGSIHTVEAFLPKLLEHGGHIAFTASFAGLVPNAGLGAYGVAKYGVVGLAETLSREMKDRGVGVTVLCPMVVETRLVSNSERIRGADYGLSSAPQVTGDMGSLPAQDDSLSVDELARLTADAILANRLYVLPHEGARTSIQRRFARIDRTFDEQAAEGWRH

SEQ ID NO: 834 - DNA, 828 bp, Artificial Sequence
  Description of Artificial Sequence: Synthetic polynucleotide
atggacggtttcgccggccgcggagccgtcattaccggcggggcgtcggggattggcttggctaccgcgacggagttcgcacgtcggggcgcgaaggtcgtcctggccgacattgacaaaccgggcctggaacgcagcgtcgagcacctccgtggaaaggggttcgatgcccacggagtcatgtgcgacgtccgccacttgtcggaagtcaaccatctggccgcggagagtgctcgcctcctggggcagatcgacgtcgtcttctcgaacgccgggattgtggtggccggcccgatcgcggacatgacccatgacgactggcgctgggtcatcgacatcgatctctggggcagcatccacaccgtggaggctttcctgcctaagctgctggagcacggcgggcacattgccttcacggcctcgttcgccggactggttccgaacgccggactgggcgcctacggagtggcaaagtatggcgtcgtggggttggccgagaccctgagtcgcgaaatgaaggaccgtggcgtcggcgtcactgtactgtgtccgatggtcgtggagactcggctcgtaagcaacagcgagcgtattcgcggcgctgactacggtctgtcgtcggcgccgcaggtcaccggtgatatgggcagtctgcccgcccaagacgatagcctgagcgtagacgaactggctcgcctgactgcggacgccatcctggctaaccggctgtacgtactgcctcacgagggggcgcgcacgtccatccaacggcgcttcgcgcgcatcgaccgcaccttcgacgaacaggccgcggaggggtggcggcat

SEQ ID NO: 835 - protein, 296 aa, Artificial Sequence
  Description of Artificial Sequence: Synthetic polypeptide
MSTAAICSTDREPTGNHMKNLQGKVAVITGAAEGIGKGIAARAAAEGMKLVLADINAAKLETTVAGFKAMGVEVIGVPTDVAREEQINALADQAFARFGNVHLLVNNAGVAVAKPAWETSQKDWDWVMGVNFYGVSHALRAFIPRMLENGEEGHIVNTASMAGLTSQPSLASYNASKHAVVTLSEGLHHDLTLRQSHIKVSVLCPGWVKTGIGHSERNRENGGDSGPTDAVALKVGMSVLNAVQNGIAVTQVADEVFDAIAAERFYILTHPEMKQAIEVRMQDVLQQRTPTLLKIT

SEQ ID NO: 836 - DNA, 888 bp, Artificial Sequence
  Description of Artificial Sequence: Synthetic polynucleotide
atgagtaccgctgcgatctgctccaccgatcgggaaccgaccggaaaccacatgaagaacctgcaggggaaggtcgcggtgattaccggggccgccgaaggcatcggcaaggggattgccgcgcgtgccgccgcagaggggatgaagctggtactggccgacatcaacgccgccaagctggaaaccaccgtagcggggttcaaggccatgggcgtcgaggtcatcggtgttcccaccgatgtagcccgtgaggagcagatcaacgccctggctgatcaggcctttgcgcgcttcggcaacgtccacctcctcgtgaacaatgcgggcgtcgccgtcgcgaaacctgcctgggagactagtcagaaggattgggactgggtgatgggcgtcaacttctacggagtgagccatgccctgcgtgccttcatcccgcgcatgctggagaacggcgaagaaggccatatcgtcaacaccgcctccatggccggcctcaccagccaacccagcctggcgagctataacgcgtccaagcatgccgtcgtgaccctgtccgagggcctgcatcacgatctgaccctgcggcagagtcacatcaaggtgtccgtcctgtgcccgggctgggtgaagacgggcatcggtcactccgagcgcaatcgcgagaacggcggggacagcggacctacggatgctgtggcgttgaaggtcggtatgagtgttctgaacgccgtccagaatggcatcgccgtgacgcaggtcgccgacgaggtattcgacgctatcgccgccgaacgcttctacatcttgacgcaccccgagatgaagcaagcgatcgaagtccgcatgcaagatgtgctgcagcaacgtacccccaccctgctgaagatcacc

SEQ ID NO: 837 - protein, 296 aa, Artificial Sequence
  Description of Artificial Sequence: Synthetic polypeptide
MNRQDLSGKTAVITGGAEGIGLSLARTLGKLGMNIVIADIETAALEAAKTSLEGQNITVLAVDMDVALKADWDRTASEAQTRFGNIHMLINNAGVSGGVGAIETLDDAGWRWCIDVNLMGVVYGANVFVPHMKRHGEQSWLINVASMAGMGGVPMAGAYTATKAAVVALTESWSQELQGSNVHVSVLAPAFVKTRIHESYRNRQPRYATDLKPTPDVFEVAKASSKAVANGIEADLLSERVIEALEQGELYIFTHPNYKPVVDQRSGNVSDAFERSAKSPLLGDVLNDKIWGFKVD

SEQ ID NO: 838 - DNA, 888 bp, Artificial Sequence
  Description of Artificial Sequence: Synthetic polynucleotide
atgaaccgccaggacctgagcggaaagaccgcggtcatcaccgggggcgccgaaggcatcggcctgagcctggcgcgcaccttggggaaactgggcatgaacatcgtcatcgcggacatcgaaactgcggccctggaggccgccaagacgtcgctggagggtcagaacattactgtcctggccgtagatatggacgtcgctctcaaggcggattgggaccggaccgcatccgaagctcaaacccgcttcggcaacatccacatgctcatcaacaacgccggagtgagcggcggtgtgggcgccattgaaaccctggacgatgccgggtggcgttggtgcatcgacgtaaacctcatgggcgtggtgtacggcgccaacgtcttcgtgccccacatgaaacgccacggcgaacaatcgtggctgatcaacgtggcaagcatggcgggaatgggcggggtgccgatggcaggtgcgtataccgcaaccaaggcggcggtggtggcactgacggagtcgtggtcgcaagagctgcagggctccaacgtccacgtgagcgtgctcgcccccgccttcgtcaaaacgcgtatccacgaatcgtaccggaaccgccagccgcgctacgcgacggacctgaagcccacgccggacgtgtttgaggtcgccaaggcctcgtcgaaggccgtcgcgaacggcatcgaggcggacctgctgagcgagcgtgtgatcgaggccctggaacagggggagctctacatcttcacccacccgaactacaagccggtggtggaccagcgttccggcaacgtttccgacgccttcgaacgtagcgccaagagcccgctgctgggcgacgtcctgaacgacaagatctggggtttcaaggtcgat

SEQ ID NO: 839 - protein, 280 aa, Artificial Sequence
  Description of Artificial Sequence: Synthetic polypeptide
MDGFLSGFDGRGAVVTGGASGIGLATATEFAHRGARLVLSDVDQPALEQAVNRLRGEGFDAHGVVCDVRNLDEMVHLADEAFRLLGSVDVVFSNAGIVVAGPIGQMNHDDWRWVIDIDLWGSIHAVEAFVPRLIEQGSGGHIAFTASFAGLVPNAGLGTYGVAKYGVVGLAETLAREVKANGIGVSVLCPMVVETKLVSNSERIRGADYGLSASPEGAFGTLPTQDESVSADDVARLTADAILANRLYILPHAAARASIRRRFERIDRTFDEQAAEGWTH

SEQ ID NO: 840 - DNA, 840 bp, Artificial Sequence
  Description of Artificial Sequence: Synthetic polynucleotide
atggatggcttcctgagcggtttcgacggtcgtggcgcagtagtgacgggcggcgcctcgggcatcggcctcgcgactgccaccgagttcgcgcaccgcggcgcccgcctggtcttgagcgatgtggaccagccggctctggaacaggcggtcaaccgcctgcggggcgaggggttcgatgcccacggggtagtgtgcgacgtgcgcaacctcgacgagatggtccacctggcggacgaagccttccgcctgctcggctccgtagatgtcgtcttcagcaacgcggggatcgtggtcgccgggccaatcggccagatgaatcacgacgactggcgttgggtcatcgacatcgacctgtggggcagcatccatgcggtagaggccttcgtgccacgcctcatcgagcagggctccggcggccacatcgcgttcacggcttcgtttgctggcttggtcccaaacgccggtctgggcacctacggagtggcgaagtatggcgtggtaggtctcgccgagacgctggcgcgggaagtcaaggccaacggcatcggggtgagcgtactctgccccatggtcgtcgagacgaagctggtgagcaactcggagcgcattcggggtgcggactacggactgagtgcctcgccggagggcgcgtttggcaccctccctacccaggatgagtccgttagtgcggacgatgtcgcccggctgacggccgacgcaattctggcaaatcgcctgtacatcctgccccacgccgccgcgcgggcgagcattcgtcggcgcttcgagcgtatcgaccggacgttcgacgagcaggccgcggaaggctggactcac

SEQ ID NO: 841 - protein, 273 aa, Artificial Sequence
  Description of Artificial Sequence: Synthetic polypeptide
MKNFSNRVAVVTGGASGIGFGLAERFLAEGMKVVLGDIEAAALDKAVGALSENGEVLGVQTDVSDFRSLQSLADATVARFGAVHLLCNNAGVGGHQRFSTTSLETWKWTLNVDLWGVINGCRIFAPILREQDEAHILNTSSMAAIMHPPFLQPYNVAKTAVVALSSGLRQEFQEEGAPIGVSVLYPFFTQTRIADDERNLPASMKGREEADPTLAALREEVRAGLATGQTPAEVAEAVMAGIRADRLHIFPHPQSIALVEEAANRLVTDAKAS

SEQ ID NO: 842 - DNA, 819 bp, Artificial Sequence
  Description of Artificial Sequence: Synthetic polynucleotide
atgaaaaacttcagcaaccgggtggcggtcgtcacgggcggcgcctccgggatcggcttcgggttggccgaacgcttcctcgccgaaggtatgaaggtcgtcctcggcgacatcgaagccgctgccctggataaggccgtcggggcgctgtccgagaacggtgaagtgctgggcgtacagaccgacgtaagtgacttccgctccctgcagagtctcgcggatgcgacggtggcccgttttggcgccgtccacctcctgtgtaacaacgctggcgtcggcggccatcagcgtttcagcaccacctccctggagacctggaagtggaccctcaacgtggacctctggggcgttatcaacgggtgccgcatcttcgccccgatcctgcgtgagcaggacgaagcgcatatcctcaacacctccagcatggccgcgatcatgcatccgccgttcctccagccttacaacgtcgcgaagacggcggtggtcgcgctgagcagcggactgcgccaggagttccaagaggaaggcgccccgatcggagtctccgtcctgtacccgttcttcacccagacccggatcgcggacgacgagcggaacctgccagccagcatgaagggccgtgaggaagcggaccctaccctggccgcgctccgcgaggaggtgcgggctggcctcgcgaccggtcagactccggcagaagtcgccgaggcggtcatggctggcatccgggcagatcgtctgcacatctttccccacccgcaaagcattgcgctggtcgaggaggccgccaatcgcctcgtcaccgacgcgaaggccagc

SEQ ID NO: 843 - protein, 275 aa, Artificial Sequence
  Description of Artificial Sequence: Synthetic polypeptide
MDGFPGRGAVITGGASGIGLATGTEFARRGARVVLGDVDKPGLRQAVNHLRAEGFDVHGVMCDVRHREEVTHLADEAFRLLGHVDVVFSNAGIVVGGPIVEMTHDDWRWVIDVDLWGSIHTVEAFLPRLLEQGTGGHVVFTASFAGLVPNAGLGAYGVAKYGVVGLAETLAREVTADGIGVSVLCPMVVETNLVANSERIRGAACAQSSTTGSPGPLPLQDDNLGVDDIAQLTADAILANRLYVLPHAASRASIRRRFERIDRTFDEQAAEGWRH

SEQ ID NO: 844 - DNA, 825 bp, Artificial Sequence
  Description of Artificial Sequence: Synthetic polynucleotide
atggacggcttccctggccgtggcgccgtgatcacgggcggcgcctccggcatcggcttggcgactggaacggagtttgcgcgccggggagcccgtgtcgtgctgggcgacgtggataaacccggtctgcgccaggccgtgaaccatctccgcgccgaggggttcgacgtgcacggtgtgatgtgcgatgtccgccatcgggaggaggtgacccacctggcggacgaggccttccgcctcctgggccacgtggatgtcgtgttctccaacgcgggcatcgtcgtcggcgggccaattgtcgagatgacgcatgatgactggcgctgggtcatcgacgtggatctctggggctccatccacaccgtggaggctttcctgccccgcctcctcgaacagggtaccggtgggcacgtggttttcaccgccagtttcgccggcctggttccgaatgcgggcctgggcgcgtacggtgtcgcgaagtacggcgtagtaggcctggcggagaccctggcccgcgaagtcaccgcggatggcattggcgtctcggtgctgtgtcctatggtggtggaaaccaacctggtcgccaacagcgaacgtatccgcggggcagcatgcgcgcagtcctcgactacgggctcgcccggtccgctgcccctgcaggacgacaacctgggcgtggacgacatcgcccagctgaccgcggacgcaatcctggccaatcgcctgtatgtgctgccccacgcagcctcgcgcgcttccattcgccgccgctttgagcgcatcgaccgcaccttcgatgagcaagcggcagagggatggcggcat

SEQ ID NO: 845 - protein, 276 aa, Artificial Sequence
  Description of Artificial Sequence: Synthetic polypeptide
MNNFDNTVGFITGGAAGIGLGVGRALGLKGMTLVLADVEENTLDKAAEELRAEGITVHTEVLDVRDADAYREVAERTLATHGKVNFLFNNAGVGGGHTNAGETPLQDWRWVVDVNLMGVVHGVEFFLPAMRACGESCYIINTASLAGHTANPGMGAYCATKFAVVGYSEAMRYELANSNIELSVLCPAWVKTRIAQSRRNHPDPEEAAQASGEQDGMNMIDQIIANEGISVEALAERVVDGMASGTFYLFTHPEFWPAMKERLDRITADYNEVMPG

SEQ ID NO: 846 - DNA, 828 bp, Artificial Sequence
  Description of Artificial Sequence: Synthetic polynucleotide
atgaataacttcgacaacaccgttggtttcatcacgggcggtgccgcaggaattggcctgggcgtcggacgggccctcggactgaagggcatgaccctggtcctggccgatgtcgaggagaacaccttggacaaggccgctgaggagctccgcgccgaagggatcactgtccatacggaagtcctcgacgtgcgggacgccgacgcctaccgtgaagtggccgaacgcaccctcgccacccatggcaaggtcaacttcctgttcaacaacgcgggtgtcggtggcggccataccaacgccggcgaaaccccgctgcaggattggcggtgggtggtggacgtcaacctgatgggcgtcgtgcatggcgtggagttcttcttgccggcgatgcgcgcttgcggcgaaagctgctacatcattaacaccgcgagcctggcgggccacaccgcgaaccctggtatgggggcctattgtgcgaccaagttcgccgtggtggggtattccgaggcgatgcgctatgagctcgccaacagcaacatcgaactctcggtgctgtgccccgcgtgggtgaagacccgcatcgcccagtcccgtcgtaaccatccggacccagaagaagccgcgcaggctagcggcgagcaggacggcatgaacatgatcgaccagatcatcgcgaacgagggcatcagtgtggaagccctcgcggagcgcgtggtggacggtatggcctcgggaactttctacctgttcacgcatccagagttctggcccgccatgaaagaacgtctggaccgcatcaccgcggactataacgaggtcatgccaggg

SEQ ID NO: 847 - protein, 279 aa, Artificial Sequence
  Description of Artificial Sequence: Synthetic polypeptide
MTDITGRVAFITGAASGIGYSLAKSFAARGAKIMMADRNAETLQRAENDLRATGADVASVVCDVTSLDSMKAAAQATLDRFAKVHIVANNAGVPMGGKPGRIPMEDWRWVLDINVIGVAHGVEVFTPILREQGEGGHFLNTASMAGLMGQAGVAPYVASKFAVVGYSESLRDEVATDNIGVSVLCPGYVNTGIHSAMFDRPSLTTTSDESAKRKGYTGMEKLIKNGMDPDAIANWALDCVEANRFYIFTNPEIRKDYAERSSGILADFDALINDGRFSS

SEQ ID NO: 848 - DNA, 837 bp, Artificial Sequence
  Description of Artificial Sequence: Synthetic polynucleotide
atgacggacatcaccgggcgcgtggctttcattaccggggccgcaagcggcatcggctactccctggccaagtcgttcgccgctcggggtgccaagatcatgatggccgaccgtaacgcggaaacgctgcagcgggccgagaacgatctgcgtgcaaccggggcggacgtggcgtcggtcgtctgcgacgtgacttccttggacagtatgaaggctgccgcccaggccaccctggaccgtttcgcaaaggttcacatcgtggccaataacgctggcgtgccgatgggcggcaagcctggtcgcattccgatggaggactggcgctgggtcctggacatcaacgtgatcggcgtagctcacggcgtcgaggtcttcactccaatcctgcgggaacaaggggagggaggccacttcttgaacaccgccagcatggcaggcctcatgggtcaagcgggggttgccccctatgtcgcctccaagttcgccgtcgttggctacagcgaatccctccgggacgaggtcgccaccgataacatcggagttagcgtcctgtgccccggctatgtcaacaccggcattcactcggccatgttcgaccggccctcgttgaccaccaccagcgacgagagcgcaaagcggaaggggtatactgggatggagaagctgatcaagaacggcatggacccggacgccatcgccaactgggcgctggattgcgtcgaggccaatcggttctacatcttcaccaacccagagatccgcaaggattacgccgaacgcagttcgggcatcctggcggacttcgacgcactgatcaacgacggccgcttctcctcg

SEQ ID NO: 849 - protein, 275 aa, Artificial Sequence
  Description of Artificial Sequence: Synthetic polypeptide
MDGFPGRGAVITGGASGIGLATGTEFARRGARVVLGDVDKPGLRQAVNHLRAEGFDVHGVMCDVRHREEVTHLADEAFRLLGHVDVVFSNAGIVVGGPIVEMTHDDWRWVIDVDLWGSIHTVEAFLPRLLEQGTGGHVVFTASFAGLVPNAGLGAYGVAKYGVVGLAETLAREVTADGIGVSVLCPMVVENNLVANSERIRGAACAQSSTTGSPGPLPLQDDNLGVDDIAQLTADAILANRLYVLPHAASRASIRRRFERIDRTFDEQAAEGWRH

SEQ ID NO: 850 - DNA, 825 bp, Artificial Sequence
  Description of Artificial Sequence: Synthetic polynucleotide
atggacgggttccctggccgtggcgccgtcatcacgggtggtgcgagcgggatcggcctggcaaccggcactgagttcgcccggcggggcgcgcgggtagtcctcggtgacgttgacaaacccggcctccgtcaggcagtcaaccatctgcgcgccgaaggcttcgacgtccacggcgttatgtgtgacgtgcgtcaccgcgaggaagtgacgcacctcgcggacgaagcgttccgcttgttgggccatgtcgacgtcgttttctcgaacgccggcatcgtggtgggcggcccgatcgtggagatgacgcacgacgactggcgctgggtcatcgacgtggacctgtggggtagtatccataccgtggaggccttcctgccgcgtttgctggagcagggcaccggcggccatgtggtcttcaccgcgagcttcgcgggtctggttccgaatgccggcctgggcgcttacggtgtcgcaaaatatggcgtcgtcggtctggccgagaccctggcgcgggaagtgaccgccgacggcatcggtgtttcggtcctgtgccccatggtcgtcgagaacaacctggtggccaactcggagcgtatccggggcgcggcctgcgcacaatccagtaccaccggctcgccgggccctttgccgctccaggacgacaacctgggcgtggacgatatcgcgcagctgaccgcggacgcaattctggcgaatcggctctatgtgctgccgcacgccgctagccgcgcctcgattcgccgtcggttcgagcgcatcgaccgcaccttcgacgaacaagccgcggaagggtggcgccac

SEQ ID NO: 851 - protein, 275 aa, Artificial Sequence
  Description of Artificial Sequence: Synthetic polypeptide
MDGFPGRGAVITGGASGIGLATGTEFARRGARVVLGDVDKPGLRQAVNHLRAEGFDVHGVMCDVRHREEVTHLADEAFRLLGHFDVVFSNAGIVVGGPIVEMTHDDWRWVIDVDLWGSIHTVEAFLPRLLEQGTGGHVVFTASFAGLVPNAGLGAYGVAKYGVVGLAETLAREVTADGIGVSVLCPMVVETNLVANSERIRGAACAQSSTTGSPGPLPLQDDNLGVDDIAQLTADAILANRLYVLPHAASRASIRRRFERIDRTFDEQAAEGWRH

SEQ ID NO: 852 - DNA, 825 bp, Artificial Sequence
  Description of Artificial Sequence: Synthetic polynucleotide
atggacggcttcccggggcgtggcgccgttatcacgggcggcgctagcgggatcggcttggcgaccggtaccgagttcgcacgccggggcgctcgggtcgtcctcggcgacgtggataaacccggactgcgccaagccgtcaaccacctgcgcgccgagggctttgacgtccacggcgtaatgtgcgacgtgcgccatcgtgaggaagtgacccacctggcggacgaagccttccgtctgctcgggcacttcgatgtggtgttctccaacgcaggcatcgtggtgggcgggccgatcgtggagatgacccatgacgactggcggtgggtcatcgatgtcgacctgtggggcagcatccacacggtcgaagcgttcctgccacgcctcctggaacagggcaccggcgggcacgtcgtcttcacggcctcctttgcgggcctcgtccccaacgccgggctgggcgcctatggcgtggcgaaatatggcgtcgtgggactggccgaaaccctggcccgcgaggtgactgcggacgggatcggggtatcggtgctgtgcccgatggtggtggaaacgaacctggtcgccaatagcgaacgtattcggggcgccgcatgtgcccaaagctcgacgaccggcagcccgggcccgttgccgctccaggacgacaacctgggtgtcgatgacatcgctcagctgaccgccgatgccatcctcgcgaaccgcctgtacgtgctcccgcatgccgcctcccgcgcctcgatccgccgccgtttcgaacggatcgaccgcaccttcgacgaacaggccgccgaaggctggcgccac

SEQ ID NO: 853 - protein, 275 aa, Artificial Sequence
  Description of Artificial Sequence: Synthetic polypeptide
MDGFPGRGAVITGGASGIGLATGTEFARRGARVVLGDVDKPGLRQAVNHLRAEGFDVHGVMCDVRHREEVTHLADEAFRLLGHVDVVFSNAGIVVGGPIVEMTHDDWRWVIDVDLWGSIHTVEAFLPRLLEQGTGGHVVFTASFAGLVPNAGLGAYGVAKYGVVGLAETLAREVTADGIGVSVLCPMVVGTNLVANSERIRGAACAQSSTTGSPGPLPLQDDNLGVDDIAQLTADAILANRLYVLPHAASRASIRRRFERIDRTFDEQAAEGWRH

SEQ ID NO: 854 - DNA, 825 bp, Artificial Sequence
  Description of Artificial Sequence: Synthetic polynucleotide
atggacggcttccccgggcgcggtgccgtgattaccggaggcgcgagcggcatcggactggccactggcaccgagttcgcccgccgtggcgcccgcgtcgtcctgggggatgttgacaagcctggcctgcgtcaggccgtcaaccatctgcgcgccgagggcttcgacgtccacggcgtgatgtgcgacgtgcgtcaccgcgaagaggtcacccatctggcggacgaggcgttccggttgctggggcacgtggatgtggtcttcagtaacgcgggcatcgttgtcggcggcccgatcgtggagatgacccacgacgactggcggtgggtgattgacgtagacctctggggcagcatccacacggtcgaagcgttcctgcctcgcctgctggagcaagggaccggcggccacgtggtcttcacggccagtttcgccggcctggttcccaatgccggcctcggcgcctatggtgtggcgaaatacggcgtggtcggcctcgcggaaactttggcccgggaagtcaccgcggacggcatcggcgtgagcgtcttgtgccccatggtagtcggaaccaatctcgtggccaacagcgagcgcattcggggcgcggcctgcgcccagagtagcaccaccggctcgccaggcccgctgccactccaggacgacaacctgggtgtggatgacatcgcgcagttgacggccgacgccatcctggcgaaccgcttgtatgtgctgccccatgccgccagtcgcgcgagcatccgtcggcggttcgagcgcatcgatcgcactttcgacgagcaagcggctgaaggctggcgccat

SEQ ID NO: 855 - protein, 291 aa, Artificial Sequence
  Description of Artificial Sequence: Synthetic polypeptide
MREFKDKVAVITGAASGIGRAIADRCVKEGMKVVLADIEEGALLRTERELKAMGAATLSVVTDISKEADIRLLAQKTVQTFGAVHLLFNNAGVDAGTGRLLWENTVADWQWVINVNIWGILFATEIFVPIMVKQKTPCHIVNTASIAGLLSGPGNGIYSASKHAVLSLSETLYQELRLIGSNVGVSVVCPGFVRTQIMDAERNRPTELRKPDGSGNLPPERQVITELARKAVQNGILPEDVANQIFEGIRKGQLYIITEPKFKPAIRQHMENVLNESNPTASQMQLVRNLL

SEQ ID NO: 856 - DNA, 873 bp, Artificial Sequence
  Description of Artificial Sequence: Synthetic polynucleotide
atgcgggagttcaaggacaaggtggccgtgatcaccggcgcagccagcggtatcggtcgcgccatcgcggaccggtgtgttaaggagggcatgaaagtggtgttggcggacatcgaggaaggcgcgctgttgcgcactgagcgcgaactgaaggccatgggcgccgccaccctcagcgtggtgacggatatttccaaggaggcagatatccgcctgctggcccagaaaaccgtccagacctttggggcggtgcacctgctgttcaacaatgcgggcgtcgacgcgggcaccggccgtctcctgtgggagaacaccgtcgcagattggcagtgggtcatcaacgtcaacatctggggaatcctcttcgcgaccgagatcttcgtgccgattatggtcaagcagaagacgccctgccacattgtcaataccgccagtatcgccggcttgctgagcggcccgggcaacgggatctacagcgcgtccaagcatgctgtcctgtccctctccgagaccctgtatcaagaactgcggctcattggcagcaatgtaggtgtgtccgtggtgtgtccgggcttcgtccgcacgcagatcatggatgcggagcgcaaccgccctaccgaactgcgcaagcctgacgggagcggtaacctgcctccggaacgccaggtgatcaccgagctcgcacgcaaggccgtccagaacggtatcctgccggaggacgtcgccaaccagatcttcgagggaatccggaagggccagctgtacatcatcactgagccgaagttcaagccagcgatccgccaacacatggaaaacgtcctgaacgagtcgaaccccactgcgtcccagatgcagctcgtccgcaacctgctg

SEQ ID NO: 857 - protein, 266 aa, Artificial Sequence
  Description of Artificial Sequence: Synthetic polypeptide
MKDQRIFITGGASGLGRALALRFARAGWRVCIGDIQDARGAEVVAELEALGSQALYLPCDVRREEDLRAVAERLEADWGGVDVVVNNAGVAQVGAIDEVPLDDWEWIVDINLLGVVRGCKVFTPVFKRQGRGHFVNVASMAGLLDVPMMSSYNATKAAVVSLSETLQNELHRHGIAVSVICPAFFKTNLGDSMRVTHPKFQAILGKLFDRSKITADHVAEEIFTAVKKRSFLVLPHAESRKIWRMKRFLPREIYAPLLRRSTRRMR

SEQ ID NO: 858 - DNA, 798 bp, Artificial Sequence
  Description of Artificial Sequence: Synthetic polynucleotide
atgaaggaccagcgtatcttcatcaccggtggcgcatccggcctcggtcgcgccctggcgctgcgcttcgcccgcgcaggctggcgggtgtgcatcggcgatatccaagatgcgcgcggtgccgaagtcgtggcggagctcgaagctctgggcagccaggccctgtatctgccctgcgatgtgcgccgcgaagaggacctgcgcgccgtcgcggaacgtctggaggccgattggggcggggtagacgtagtggtgaacaatgccggagtggcccaagtgggcgccatcgacgaggtcccgctggacgattgggagtggatcgtcgacatcaatctgctgggcgtcgtacgcggctgcaaggtcttcacgccggtgttcaagcgccaaggacgcggccacttcgtcaacgttgcaagcatggccgggttgctggacgtgccgatgatgtcctcgtacaacgcgacgaaggccgcggtcgtaagtctgtcggagaccctgcaaaacgagctgcaccgccacggcattgcggtgagcgtcatctgtcccgccttcttcaagacgaacctcggcgattcgatgcgcgtcacgcacccgaaattccaggccatcctcggaaagctgttcgatcgtagcaagatcaccgctgatcacgtcgctgaagagatcttcaccgccgtcaaaaagcgctcgttcctggtcctcccgcatgccgagtcccggaagatctggcgcatgaagcgcttcctgccgcgtgagatctatgccccgctgttgcgccgctcgacgcgccgcatgcgc

SEQ ID NO: 859 - protein, 300 aa, Artificial Sequence
  Description of Artificial Sequence: Synthetic polypeptide
MKQFESKVAVITGGASGFGKEFARIGASLGMKLVLADVQEDSLDSTVAEFKSQGAQVIGLRTDVSKAEEVQVLADAAMTAFGEVNLLFNNAGVGAGGLIWENTQKDWDWVLGVNLYGVVNGVRIFTPLMLEAARKDPGYQGHIVNTASMAGLLNPPAMGVYNVSKHAVVALSETLYQDLSLVTDQVHCSVLCPFYVPTGISQSQRNRPANMANDQPPTRSQMVSQALSDKAVNSGKVSAADVAQMTFDAIREDGFYIYSHPQSLDSVQRRMEEIVNQRNPGDPFGDKSEVRAGLIAALRG

SEQ ID NO: 860 - DNA, 900 bp, Artificial Sequence
  Description of Artificial Sequence: Synthetic polynucleotide
atgaagcaattcgaatccaaagtcgccgttatcaccggaggggctagcggcttcggaaaggagttcgcgcgtatcggggccagcctgggcatgaagctcgtgctggcggacgtccaggaagattccctggacagcactgtcgcggaatttaagtcgcagggcgcccaggtcattggcctgcgcacggatgtctcgaaggcggaagaagtgcaggtcctggcggacgccgcgatgacggcgtttggcgaggtcaacttgctgttcaacaacgccggtgtgggtgccgggggcttgatctgggagaacacccagaaggactgggactgggtcctcggcgtaaacctctacggcgttgtcaacggcgtgcgcatcttcaccccgttgatgctggaggccgcccgtaaagacccgggctatcaggggcacattgttaacacggcgtcgatggcaggcctgctcaatccgccggccatgggggtatacaacgtgtcgaaacacgccgtagtggcgctctccgagaccctgtaccaggacctctcgctggtaaccgaccaggtccactgttcggtgctgtgcccgttctatgtgccgaccggcatctcgcaaagccagcggaaccgccccgccaacatggcgaacgaccaacctccaacccgttcccaaatggtcagccaggcgctgagtgacaaggccgttaacagcgggaaggtcagcgctgccgacgtggcccagatgaccttcgacgcgatccgggaagacgggttctatatctattcgcacccgcagagcctcgactcggtgcagcgccgcatggaggaaatcgtcaaccagcgcaatccgggcgaccctttcggggataagtcggaggttcgtgcgggcctgatcgccgccttgcgtggc

SEQ ID NO: 861 - protein, 275 aa, Artificial Sequence
  Description of Artificial Sequence: Synthetic polypeptide
MDGFPGRGAVITGGASGIGLATGTEFARRGARVVLGDVDKPGLRQAVNHLRAEGFDVHSVMCDVRHREEVTHLADEAFRLLGHVDVVFSNAGIVVGGPIVEMTHDDWRWVIDVDLWGSIHTVEAFLPRLLEQGTGGHVVFTASFAGLVPNAGLGAYGVAKYGVVGLAETLAREVTADGIGVSVLCPMVVETNLVANSERIRGAACAQSSTTGSPGPLPLQDDNLGVDDIAQLTADAILANRLYVLPHAASRASIRRRFERIDRTFDEQAAEGWRH

SEQ ID NO: 862 - DNA, 825 bp, Artificial Sequence
  Description of Artificial Sequence: Synthetic polynucleotide
atggacggatttccgggccgcggcgctgtgatcactggcggcgcatcgggcattggcctcgccaccggcaccgagttcgcgcgtcggggtgcgcgtgtcgtcttgggtgacgtggacaagcccggcctccgccaggcggtgaaccatctgcgcgccgaaggcttcgacgtgcacagcgttatgtgcgacgtgcggcatcgcgaggaggtcacgcatctggcggacgaggccttccgcctcctgggccatgtcgacgtggtcttctccaatgccggcatcgtggtaggcggcccgatcgtcgagatgacgcacgacgactggcgctgggtcatcgatgtagacctctgggggagcatccacaccgtggaggccttcctcccgcggctgttggagcagggtaccggcggccacgtggtgttcaccgcttcgttcgcgggcctggtcccaaacgccggactgggtgcttacggcgtggccaagtacggcgttgtcggcttggcggaaaccttggcccgggaagtcaccgcggacggcatcggagtgtccgtactgtgccccatggttgtcgaaaccaacctggtggccaattcggaacgcatccgcggtgcggcttgcgcccagagcagcaccaccggatcgcccggccccctccctctccaagacgataatctgggcgtggatgacatcgcacagctgacggccgacgccatcctggccaaccgcctgtacgttctgccgcacgcggccagtcgtgccagtatccggcgtcgtttcgaacgtatcgatcggaccttcgatgaacaggcagccgagggctggcgccac

SEQ ID NO: 863 - protein, 276 aa, Artificial Sequence
  Description of Artificial Sequence: Synthetic polypeptide
MDGFAGSGAVITGGASGIGLATATEFARRGAKVVLADIDKPGLERSVEHLRGKGFDAHGVMCDVRHLSEVNHLAAESARLLGQIDVVFSNAGIVVAGPIADMTHDVWRWVIDIDLWGSIHTVEAFLPKLLEHGGHIAFTASFAGLVPNAGLGAYGVAKYGVVGLAETLSREMKDRGVGVTVLCPMVVETQLVSNSERIRGADYGLSSAPQVTGDMGSLPAQDDSLSVDELARLTADAILANGLYVLPHEGARTSIQRRFARIDRTFDEQAAEGWRH

SEQ ID NO: 864 - DNA, 828 bp, Artificial Sequence
  Description of Artificial Sequence: Synthetic polynucleotide
atggacggctttgccggaagcggcgccgtgatcaccggtggggccagcggcatcggtctggcaaccgccaccgagtttgcccgccgcggtgcgaaggtcgttctggccgacatcgacaaacctggcttggagcgcagcgtcgaacatctgcgcggcaagggtttcgacgcgcacggcgtcatgtgtgacgtccgccacttgtccgaggtgaatcacctggccgccgagagcgcccgcctcctcggccaaatcgacgtggtgttctccaatgcaggcatcgtcgtggccggcccgatcgcggacatgacccatgacgtctggcggtgggtcatcgacattgacctgtggggctcgatccatacggtggaggccttcctgcccaaactgctggaacacggcggccacatcgcgttcaccgccagcttcgctggcctcgtacccaacgcggggctgggcgcgtatggagtggccaagtacggcgttgtcggactggccgagaccctctcccgcgagatgaaagaccgcggggtcggcgtcacggtgctgtgcccgatggtcgtggaaacgcagttggtcagcaacagcgagcgcatccgcggggccgactatgggctgtcctcggcaccgcaggtcaccggagacatggggtcgctcccggcccaagacgactccctgagcgtggatgagctggcacgcttgaccgccgacgctattctggccaacggcctgtacgtcctgccccatgaaggggcgcgcacgagcatccagcgccgtttcgcccgcatcgaccgcacctttgacgaacaggcggcagagggatggcgccat

SEQ ID NO: 865 - protein, 276 aa, Artificial Sequence
  Description of Artificial Sequence: Synthetic polypeptide
MDGFEGRGTVVTGGASGIGLATATEFARRGARVVLSDVDQPGLEQAVNHLRAQGFDAHGVVCDVRHLHEMVHLAKESFRLLGRVDVVFSNAGIVVAGPIAQMTHDDWRWVVDIDLWGNIHAVEAFLPRLREQGTGGHLAFTASFAGLVPNAGLGAYGVAKYGVVGLAETLAREVKEDGIGVSVLCPMVVETKLVSNSERIRGADYGLTSSPKAADGTLPTQDEGVGVEDVARLTADAILANRLYVLPHEAARASIRRRFERIDQTFADQAAEGWSH

SEQ ID NO: 866 - DNA, 828 bp, Artificial Sequence
  Description of Artificial Sequence: Synthetic polynucleotide
atggacggcttcgaagggcgcggtacggtggttacgggcggcgcctccggcattgggctcgcgaccgcaacggagtttgcccgccgtggcgcccgggtcgtgttgagtgatgtggaccaaccgggcctggaacaagcggtcaaccacctccgcgcgcagggctttgatgcccacggggtggtgtgtgacgtgcgccacctccacgagatggtgcacctcgcgaaagagagctttcggctgctcggccgcgtggacgtggtcttcagcaacgcgggcattgttgtcgcgggaccgatcgcccagatgacccacgacgactggcggtgggtggtcgacatcgacctctggggaaatatccacgcggtcgaggcttttctgccgcgcctgcgcgagcaaggcaccggcggccatctggccttcacggcgtcgttcgcgggtctggttccgaatgccggcctgggcgcctatggcgtagcgaaatatggcgtcgtcggtctggcggagaccctggcccgcgaggtcaaagaagacggcatcggggtgtccgtcctctgccccatggtggtggagacgaagctggtgtccaactcggagcgtattcgcggcgcagactatgggctcaccagcagtccgaaggcagcggacggcaccctgccgactcaggacgagggcgtgggcgtcgaagacgtggcgcggctgactgcggatgcaatcttggcgaaccgcctctatgtgctgccacacgaggcggcacgcgccagtattcgccgccgctttgaacgcatcgaccagaccttcgcagaccaggccgccgaaggctggtcgcac

SEQ ID NO: 867 - protein, 291 aa, Artificial Sequence
  Description of Artificial Sequence: Synthetic polypeptide
MREFKDKIAVVTGAASGIGRAIADRCINEGMKVVLADIEEEALLRAEKQLKDMGAETLSVVTDISKEADIRALAQKTVQTFGAVHLLFNNAGVDAGTGCLLWENTVADWQWVINVNIWGILFATEIFVPIMLKQKTACHIVNTASIAGLLSGPGNGIYSASKHAVLSLSETLHQELRLIGSNVGVSVVCPGFVRTQIMDAERNRPTELSKQTGLGNLPPERQAINQLARKAVQNGILPEDVANQMFEGIKKGQLYIITEPKFKPAIRQHMENVLNESNPTPSQMQLVRNLL

SEQ ID NO: 868 - DNA, 873 bp, Artificial Sequence
  Description of Artificial Sequence: Synthetic polynucleotide
atgcgggagttcaaggataagatcgcggtggtgaccggagccgcatcgggaatcggtcgcgctattgctgaccgctgcatcaacgagggtatgaaggtagtcttggccgacatcgaggaagaagccctcctgcgcgcggagaaacagctgaaagacatgggcgccgagaccctgagcgtagtcactgatatctcgaaggaagccgacattcgtgccctggcccagaagaccgtacagacctttggagcggtgcacctgttgttcaacaatgccggcgtggacgctggcacgggttgcctcctgtgggagaacaccgtggcggactggcagtgggtgatcaacgttaacatctggggcatcctgttcgccaccgagatctttgtccctatcatgctgaagcaaaagaccgcgtgccacatcgtgaacactgcctccatcgccgggctgctgtcgggaccgggcaacggcatctacagtgcgagcaagcacgcggtcctgtccctcagtgagacgctccatcaggaattgcggctgatcggctcgaacgtcggcgtctccgttgtgtgtcctggcttcgtgcgcacccagatcatggatgctgagcgtaatcgcccgaccgagctgagcaagcagacgggactcggtaacctgccgccggagcgccaggcgattaaccaactggcgcgcaaggcagtacagaacggtatcttgcccgaagacgtggccaaccagatgttcgagggcatcaagaaggggcaactgtacatcatcaccgagcccaagtttaagcctgccatccgtcagcacatggagaacgtactgaacgagagcaaccccaccccgagccagatgcagctcgtgcgcaacctgctg

SEQ ID NO: 869 - protein, 294 aa, Artificial Sequence
  Description of Artificial Sequence: Synthetic polypeptide
MNIFENKTVVISGGAEGIGLAVARALGKRGMNIVIADIDATQLSVAEAELAGAGIPVLATTLDVADLSQWKRVAEQSIERFGKVHMVVNNAGVGGKGGTIEETDSSTWQWVIDVNLMGVVYGTQVMVPLMKSHGEGGWVVNVASMAGFGPLPLATPYTATKAAVVAMTENWAQELAPEGIHACVLCPGFTQTRINLSERNKHDRYANNESGDESKSASSLNSTLKKVVETGMPSGVVAERLIEALEAKELYVFTHPSYRPLVNVRFNATAVAFDNAIQSPLLANYKDLMLPSFN

SEQ ID NO: 870 - DNA, 882 bp, Artificial Sequence
  Description of Artificial Sequence: Synthetic polynucleotide
atgaacattttcgaaaacaagaccgtagtaatcagtggcggcgccgaaggcatcggcctggccgtcgcccgggctctggggaagcgcggtatgaacatcgtgatcgcggacatcgatgccacccaactgtcggtggccgaggcggaactggcaggagctggcattccggtcctggccactaccctggatgtggcggacctgagccagtggaagcgcgtagccgagcagtccatcgaacgtttcggaaaggtgcacatggtcgtcaacaacgccggcgtcggtggcaagggcggcaccatcgaagagaccgattcgagcacctggcaatgggtcatcgacgtcaacctgatgggcgttgtctacggcacgcaggtcatggtcccgctcatgaagtcccacggtgaaggcggctgggttgtgaacgttgcctccatggccggctttggtcccctcccactggcgactccctacaccgcaacgaaggccgcggtcgtggctatgactgaaaactgggcgcaggaactggccccggagggcattcacgcctgcgtgttgtgtcctggcttcacgcaaacccgcatcaacctctcggagcgcaataaacatgaccgctacgccaacaacgagtccggcgacgagtccaagtccgccagcagtctgaactccaccctcaagaaggtggttgagacgggcatgcctagtggcgtcgtggctgagcgtctcattgaggcactggaggcgaaggagctgtatgtcttcacccacccgtcctatcgcccgctggtgaatgtccgcttcaatgccaccgccgtcgcgttcgataatgccattcagtcgccactgctggccaactataaggacttgatgctgccctcgttcaac

SEQ ID NO: 871 - protein, 291 aa, Artificial Sequence
  Description of Artificial Sequence: Synthetic polypeptide
MSQFAGKTAVISGGGEGIGLSIARALGEQKMNIVLADIDPKNLQNAAAELESNGISVMSVALDVADEAQWQAVADQAIARFGKVHMVVNNAGVGGDSGPIEIQEKKGWQWALDVNLMGVVYGAKVMVPLIKQHGEGGWVVNVASMAGMGGVPFSGAYTATKAAVVALTESWAGELHSKGIRVSVLCPAFVQTRIFDSERNRPSQYQSDNVNSARKGSFSSKTKQMVDNGIEVSIVGKRVVEALNDGEMYIFTHPNYRPVLQQRAEAIDQALQKAAKSPLLQHVVNQKLDML

SEQ ID NO: 872 - DNA, 873 bp, Artificial Sequence
  Description of Artificial Sequence: Synthetic polynucleotide
atgtcccagttcgcgggcaaaactgccgtcatctcgggcggtggcgaaggcatcggcctgagcattgcccgggcactgggggaacagaagatgaatatcgtcctcgcggacatcgacccgaagaacctgcagaatgccgcggcggagctcgaaagcaatggaatctcggtgatgagcgtggccctggacgtcgccgacgaggcgcagtggcaagccgtggcggatcaggcgatcgcccgctttggcaaagtgcacatggtggtgaacaacgctggcgtcggcggtgactcgggccccatcgagatccaggagaagaaggggtggcagtgggcgctcgacgtaaacctgatgggcgtggtgtacggcgcgaaggtgatggtgccgctgatcaagcagcatggcgagggtggctgggtcgtgaatgtagcgagcatggccggcatgggtggcgtgccgttctcgggggcttacaccgcaacgaaggccgccgtcgtggccctgactgaaagttgggcaggtgaactgcactcgaagggcatccgcgtctccgtcctgtgtccggccttcgtgcaaacccgcatctttgattcggagcggaatcgcccgtcccagtatcagagtgacaacgtcaacagcgcccgtaagggctcgttcagctcgaaaaccaagcagatggtcgacaacggcatcgaagtcagcatcgtggggaagcgggtcgtggaggcgctcaacgacggcgagatgtacatcttcacccatccgaactatcgtcctgtcctgcagcagcgcgccgaagccatcgaccaagccctccagaaggcggccaagtcgcctctcctgcagcacgtggtcaaccagaagctcgatatgctg

SEQ ID NO: 873 - protein, 274 aa, Artificial Sequence
  Description of Artificial Sequence: Synthetic polypeptide
MATQRIFITGGASGLGKAIAVRFARAGWKVCIGDVNDTRGEEALKELSALAPQAHYLRCDVRREEDLREALDWLTAQWGGVDVVINNAGVAQAGAIEDVSIDDWQWIIDINLLGVVRGCKVFTPAFKKQGHGHIVNVASMAGLLDVPLMSSYNATKAAVVSLSETLHNELAEYGIGVSVVCPSFFKTNLGDSLRTTDPRLGATMARLLERSAITADDIANDVFDAVAERGFYVLPHADGRRTWALKRLLPRELYSWMLRRNTRGMRPGSQPKAS

SEQ ID NO: 874 - DNA, 822 bp, Artificial Sequence
  Description of Artificial Sequence: Synthetic polynucleotide
atggctacccagcgcatcttcatcaccggtggcgcgtcggggctgggcaaggccatcgccgtacggtttgcccgggccggctggaaagtctgcatcggcgacgtcaacgatacccgcggtgaggaagccctgaaggagctgagtgccctggcgccgcaggctcactacctccgctgcgatgtccgccgcgaagaagacctgcgggaagccctggactggctgacggcgcaatggggcggcgtggacgtcgtgatcaacaacgctggcgtggcccaggcgggcgctatcgaggacgtgagcatcgatgactggcagtggatcatcgacatcaatctcctgggcgtcgtgcggggctgcaaggtcttcactccggcctttaagaagcaaggccatggccacatcgtgaacgtggccagcatggccggtctgctggacgtccccctgatgtcgtcgtataacgcgaccaaggcggccgtagtatcgttgagcgagaccttgcataacgagctggccgaatacggcatcggggtgagcgtagtctgtccgtccttcttcaagaccaacctgggcgacagcctccgtacgaccgacccccggctcggtgccactatggcccggctcctggagcgctcggcgatcaccgccgatgacatcgcgaacgacgtgttcgacgcggtcgctgaacgcggattctacgtgctgccccatgcggatggtcgccgcacgtgggccctgaagcgcctgctgcctcgtgaattgtactcgtggatgctgcgtcgcaacacccgcggcatgcgcccaggcagccagccgaaggccagt

SEQ ID NO: 875 - protein, 291 aa, Artificial Sequence
  Description of Artificial Sequence: Synthetic polypeptide
MSQFAGKTAVISGGAEGIGLSIAQALGDQKMNIVIADIDQENLQKAGSELVAAGISVLTVALNVADEAQWQEVANQALARFGKIHMVVNNAGIGGDTGPIENQDKKGWQWALDVNLMGVVYGAKIMTPLIKEHGEGGWIVNVASMAGMGGVPYLGAYTATKAAVVALSESWAGELEEKGIHVSVLCPAFVQTRIHESERNRPAQYQSNELQTSNENSFANSAKQMVESGIEVSIVGKRVVEALNDGEFYIFTHPNYRPIMQGRTAAIDAAFKKSAQSPLLEHIVNQKIEMP

SEQ ID NO: 876 - DNA, 873 bp, Artificial Sequence
  Description of Artificial Sequence: Synthetic polynucleotide
atgagccaattcgcgggcaagaccgccgtcatcagcgggggcgccgaagggatcggactgtccatcgcgcaagccctcggcgaccaaaagatgaacatcgtgatcgccgacatcgatcaggagaacctgcagaaagcgggcagcgagctcgtggccgccggcatcagcgtactgaccgtcgccctgaacgtcgccgacgaagcgcagtggcaggaagtcgccaatcaagcgctggcccgcttcgggaagattcacatggtcgtgaacaatgcggggatcggtggcgacaccgggcccatcgagaaccaggacaagaagggctggcagtgggcactcgatgtaaacctcatgggcgtggtctacggcgccaaaatcatgactccgctgatcaaagaacacggcgagggcggctggatcgtgaacgtggccagcatggcgggcatgggaggcgtcccttacctcggtgcgtataccgctaccaaggctgccgtggtggccctgagtgaaagctgggcgggggaactggaggagaagggcatccacgtaagtgtactgtgccctgccttcgtccagacccggattcacgagtccgaacgcaaccggccggcccagtaccagagcaacgaactgcagaccagtaacgagaactcgttcgccaacagtgcgaagcagatggtcgagtccggcatcgaagtgtcgatcgtcgggaagcgggtcgtcgaagcgctgaacgatggcgagttctacatcttcacccaccccaactaccgccctatcatgcaaggccgtaccgccgccatcgacgccgcgtttaagaagagcgcccagtcgccgctcctcgaacacatcgtgaaccagaagatcgagatgccg

SEQ ID NO: 877 - protein, 278 aa, Artificial Sequence
  Description of Artificial Sequence: Synthetic polypeptide
MRAVDGFPGRGAVITGGASGIGLATGTEFARRGARVVLGDVDKPGLRQAVNHLRAEGFDVHSVMCDVRHREEVTHLADEAFRLLGHVDVVFSNAGIVVGGPIVEMTHDDWRWVIDVDLWGSIHTVEAFLPRLLEQGTGGHVVFTASFAGLVPNAGLGAYGVAKYGVVGLAETLAREVTADGIGVSVLCPMVVETNLVANSERIRGAACAQSSTTGSPGPLPLQDDNLGVDDIAQLTADAILANRLYVLPHAASRASIRRRFERIDRTFDEQAAEGWRH

SEQ ID NO: 878 - DNA, 834 bp, Artificial Sequence
  Description of Artificial Sequence: Synthetic polynucleotide
atgcgggccgtggacggtttccccggtcgcggagcggtgatcacgggtggtgctagcggcatcggcctcgccacggggactgaatttgcccgtcgtggcgcccgcgtggtcctgggagacgtggacaagcccggcctgcgtcaggcggtcaaccacctgcgcgcggaaggctttgacgtccattccgtgatgtgtgacgtccgccaccgcgaggaggtcacccacctggcggacgaagccttccgtctgttggggcacgtggacgtggtcttctccaatgcggggatcgtcgtgggcggccctatcgtggagatgacccatgacgactggcgctgggtcatcgacgtcgacctgtggggcagcattcacaccgtcgaggccttcctgccacgtctgctggaacagggcaccggcggacatgtggttttcacggccagcttcgccggcctcgttccgaacgccggtctcggagcctatggcgtggccaagtatggcgtcgtgggcctggcagaaactctcgcccgcgaggtcaccgcggacggtattggtgtgtcggtactgtgtcccatggtggtagagactaacctggtcgcgaacagtgagcgtatccgcggggccgcttgcgcgcaaagctcgaccactggctcgcccgggccgctcccgctgcaggatgacaacctgggcgtcgacgacatcgcccaactgaccgcggacgccatcctggccaatcgcctgtacgtcctgcctcatgccgccagtcgtgccagcatccgccgtcggttcgagcgcatcgaccgcacctttgacgagcaagccgccgaaggctggcgtcat

SEQ ID NO: 879 - protein, 297 aa, Artificial Sequence
  Description of Artificial Sequence: Synthetic polypeptide
MPQENSTSQFQGKTAIISGGAEGIGLSIAKALGEQQMNVVLADIDKDNLERARLELQSLGVPVLAVSLDVADEGQWQLAAEAAVERFGKIHMVVNNAGVGGDSGPIESQEKEGWQWALDVNLMGVVYGAKVVVPLIKEHGEGGWIINVASMAGMGGVPYSGAYNATKAAVVALSEAWSEELKSKSVHVAVLCPAFVQTRIYDSERNRPAQYKSKTLSPGDESSFSKRAREMVQNGIDVALVGKRVVEALNDGELYIFTHPNYRQVVQYRSARIDQAFVNAGKSPLLQHLVDQKLDML

SEQ ID NO: 880 - DNA, 891 bp, Artificial Sequence
  Description of Artificial Sequence: Synthetic polynucleotide
atgccgcaggaaaactccacttcccaattccaaggcaagacggccatcatctcgggtggcgctgaaggcatcggactgtcgattgcgaaggccctgggcgagcaacagatgaacgtcgtgctcgccgatattgataaggacaacttggagcgcgcgcgtctggaactccagtcgctgggcgtaccggtgttggcggtctcgctggatgtcgccgacgaaggccagtggcagctggcggcggaagcagcggtagaacggtttggcaagatccacatggtggtcaacaacgccggcgtcggtggcgactccggccctatcgaatcccaggagaaagaaggatggcagtgggccctcgatgtgaatctcatgggcgtcgtgtacggcgcgaaggtggtggtgcccctcatcaaggagcatggcgagggaggctggatcatcaatgtggccagcatggccggcatgggaggcgtcccctattccggtgcgtacaacgccaccaaagccgccgttgtggccctgtccgaagcgtggtcggaggagctgaaatcgaagagcgtccacgtcgccgtgctgtgtccggcattcgtacagacccgcatctacgactccgagcggaaccgtcccgcccagtacaagagcaaaacgctgagccccggagacgagtccagcttcagcaagcgggcgcgcgaaatggttcaaaacggcatcgacgtggcgttggtcggcaaacgcgtggtcgaagcactcaacgacggggagctctatatcttcacccatccgaactatcgccaagtcgtgcagtatcgctcggctcgcatcgaccaggcgttcgtgaacgccggcaagagccccctgctgcagcacctggtcgaccagaagctggacatgctg

SEQ ID NO: 881 - protein, 285 aa, Artificial Sequence
  Description of Artificial Sequence: Synthetic polypeptide
MNQFENKVAVITGAASGIGRALAMRCAEEQMKVVLADVEVVELQRVEQELQSAGATVLAVVTDVSKEKDIQTLAQKTLDMFGAVHLLFNNAGVGAGSTIWQSTLADWQWVMNVNLWGAIHATQIFVPMMLKQGTECHIVNTASLAGLESGPGNSIYRVSKHALVSLSETLYHELKMIQSKIGVSVLCPGFVQTQICDAHRNRPAEYSKPGDIVEPSPMSSAIDQFIRSGVEQGISPKEVADHTFLAIKSNRFYILPDPSYKEPVRQRMEDILNQHNPTFVIPSHI

SEQ ID NO: 882 - DNA, 855 bp, Artificial Sequence
  Description of Artificial Sequence: Synthetic polynucleotide
atgaaccaattcgagaataaggtggctgtcattaccggcgcggctagtggtatcggccgtgccctggccatgagatgtgcggaggagcagatgaaagtcgtcttggccgatgtcgaggtggtggaactgcaaagagtagaacaggaactccaatctgcgggcgcaaccgtgctggcggtcgtcacggatgtgagcaaggaaaaggatatccagacgctagcccaaaagaccctcgacatgttcggcgcggtgcacctgctctttaacaacgcgggcgtcggcgcgggatcgacaatttggcagtccactctggccgattggcagtgggtaatgaacgtgaacttgtggggcgctatccatgccacccagattttcgtgccgatgatgctcaagcaggggacagaatgccatatcgtcaatactgcctcgctggcgggcctggaatcgggccccggcaatagcatctatcgtgtcagcaagcatgccctggtgagcctgagcgaaacgctgtaccacgagctaaagatgatccagtccaagatcggcgttagcgttctgtgtcccggctttgtccagacccagatctgcgacgcccaccggaacagacccgccgaatatagcaagcccggcgacatcgtagaaccgtctccaatgagtagcgccattgaccagttcatcagaagcggagtcgaacagggcatatcgccaaaggaggtagcggaccataccttcctagccatcaagtccaaccgtttctacatcctgccggacccgagctacaaagaacccgtgcgacagcggatggaggacatcctgaaccagcataacccgacgttcgtcatccctagccatatc

SEQ ID NO: 883 - protein, 304 aa, Artificial Sequence
  Description of Artificial Sequence: Synthetic polypeptide
MTESRRVAFITGGISGIGLGIAKAFDEAGFALALTYRNEDYRDQASQWFAENSDIPPLFLKLDVTDRNRFSEVAKEIDARFGRLDVLVNNAGVSVFGPTDEATFADYDWIMNVNFGGVVNGLVSLLPLIKRTGPGSHIVNVASMAAYLSGPQAGIYTASKFAVRGLTESLRYNLASLGIGVSLLCPGLTRTNAWDSAFRRPDAFADTGFGAVDRADLTAFGKAFEMGMNPLEVGRKTLQGIERNQGLIFSHPEYAEDFREIYETSIAALPDEDAPAERLEIERLRREANRAAAAGRSISIDDLT

SEQ ID NO: 884 - DNA, 912 bp, Artificial Sequence
  Description of Artificial Sequence: Synthetic polynucleotide
atgactgagagccgccgcgttgccttcatcactggcggcatcagtggcatcggtctgggcattgccaaagcgtttgatgaagccggcttcgctctcgcgctgacctaccgcaacgaggactaccgcgaccaggcgtcccagtggttcgcggagaactcggatatcccaccgctgtttctgaagctggacgtcacagaccgcaatcgcttcagcgaagtcgcgaaggaaattgacgccaggttcggacggctggatgtcctggtcaacaatgcgggcgtctccgtgttcgggccgaccgacgaggccacgttcgcagactacgactggatcatgaacgtgaacttcggcggggtcgtgaacggcctggtgtcgcttctgcccttgatcaagcgcacgggccccggtagccacattgtgaacgtggcgagcatggcagcgtacctgagcggtccacaagcgggtatatataccgcctccaagttcgccgtccgcggcctgaccgagagcctgcgctacaatctggcctcactaggcatcggggtgtcacttctgtgtcctgggctgactcgcaccaacgcctgggacagcgcgttcagacgccctgatgccttcgcggacaccggattcggtgcggtggaccgcgcggacctcaccgccttcggcaaagcgttcgaaatgggcatgaaccccctggaggtgggccgtaagacgctgcaggggatcgagcgcaaccagggcctgatcttctcccatccggaatatgccgaggacttccgcgagatctacgagacctcgattgcagccctgccggacgaggacgccccggcggaacgcttggagatcgaacgtttgcgccgtgaggccaaccgcgcggcggcagccgggagatccatcagcatcgatgacctgacc

SEQ ID NO: 885 - protein, 279 aa, Artificial Sequence
  Description of Artificial Sequence: Synthetic polypeptide
MAGSTGFAGRGAVITGGASGIGLATATEFARRGAAVVLADVDQPGLEQAVTHLRAGGFEAHGVMCDVRHLREVTHLADEASRLLDRVDIVFSNAGIVVAGPIADMTHDDWRWVIDIDLWGSIHAVEAFLPGLLEHGGHIAFTASFAGLVPNAGLGAYGVAKYGVVSLAETLAREVKDRGVGVSVLCPMVVDTKLVSNSERIRGADYGLSAAPDVTGTTGSLPAQDDSLTVDDVARLTADAIAANRLYVLPHQAARASIRRRFERIDRTFDQQAAEGWCH

SEQ ID NO: 886 - DNA, 837 bp, Artificial Sequence
  Description of Artificial Sequence: Synthetic polynucleotide
atggccggctcgaccggcttcgcgggccgtggcgcggtaatcacaggcggtgcgtccggcatcggcctggctacggccaccgagttcgcgcgaagaggagccgccgtcgtgctggcggacgtcgatcagcctggcctggaacaagccgtgacccatctgcgggccggcggcttcgaggcccatggtgtgatgtgtgatgtccgccacctgcgcgaagtgacccacctggctgacgaggcctcacgcctgcttgaccgcgtcgacatcgtgttcagcaacgccggcatcgtggtggccggccccatcgccgacatgacccacgacgattggcgctgggtgatcgacatcgacctgtggggttccatccacgccgtagaagccttcctgcctggactgctcgaacacggcggccatatcgccttcacggcgtcgttcgcgggcttggtgccgaatgccggcctgggcgcctacggagtcgcgaaatatggtgtcgtcagcctcgccgagaccctggcgcgcgaggtgaaagaccggggcgtaggcgtgagcgtgctgtgccccatggtagtggacaccaagctggtgagcaatagcgagcgcatccgcggagccgactacggcctgtcggcggcccctgacgtgactggtacaactgggtcccttcctgcccaggacgactccctcaccgtggacgatgtggcgaggctcactgctgacgccatcgcagccaaccgcctctacgtgctgccgcaccaggcggcaagagcctctattcgacgccgtttcgagcgcatcgaccgtaccttcgaccagcaagccgccgagggctggtgtcat

SEQ ID NO: 887 - protein, 293 aa, Artificial Sequence
  Description of Artificial Sequence: Synthetic polypeptide
MEFTNRTVLVSGGAEGIGFAIAKALGSSGMNVVLGDINEQALQNALTKLSGLGINCKGLVMDVVKPEDWQRAVALATDQYGALHALINNAGVGGKPGPIENNTLADWQWCIDVNLLGVVQGMQAAVPHIKRAGGGFVVNVASMAGMMGVPYGGEYTATKLAVAGLSEAWAVELAPFDIHVAALCPAFVSTKIHLSERNRALTHGQTTKAEEIELPDPDSVMSQVVTNGIDPDLVGQRVVEALNAKEHYIFTHPNYRAVVQQRFAAIDAAFARAESSPIVGHLSSEPLDAFVPQ

SEQ ID NO: 888 - DNA, 879 bp, Artificial Sequence
  Description of Artificial Sequence: Synthetic polynucleotide
atggagtttaccaaccgcacagtgctggtcagcgggggagcagaaggcatcggcttcgcgatcgccaaggctttgggctcctctgggatgaacgtcgtactgggcgacatcaatgagcaggcgctgcagaacgcgctgaccaagctgtcaggcctgggtattaactgtaagggcctcgtcatggacgtcgtaaagcctgaggactggcagcgcgcggtggctcttgcgaccgatcagtatggtgcgctgcacgccctcatcaacaacgctggagttggcggcaagcccggaccgatagaaaacaacaccctagccgactggcaatggtgcattgacgtcaacctgctgggcgtggtgcagggaatgcaggcggccgttccccatattaaacgggcgggaggcggcttcgttgtcaacgtcgccagcatggccggcatgatgggcgttccctatggcggagagtacactgctacgaaactggccgtagccggcctgagcgaggcctgggcggttgaactcgccccgtttgatatccatgtcgcagcgctgtgcccggcctttgtctccaccaagatccacttgtctgagcgcaaccgagccctgacccatggccagacgacaaaggccgaagagatagaactgccagacccggacagcgtgatgtctcaagtggtgaccaacgggatcgacccggacttggtcggtcagcgcgtcgttgaagctctgaacgcgaaggagcattatatcttcacccatccgaactatcgcgcggtcgtacagcagcggttcgccgcaattgacgcggcgttcgcccgtgctgaatcgtcgccgatcgtgggccatttgtctagtgaaccgctggatgcctttgtgccccaa

SEQ ID NO: 889 - protein, 274 aa, Artificial Sequence
  Description of Artificial Sequence: Synthetic polypeptide
MATQRIFITGGASGLGKAIALRFARAGWKVCIGDVNDARGEEAQKELTALAPQAHSLRCDVRREEDLREALDWLTARWGGVDVVINNAGVAQAGAIEDVSIDDWQWIIDINLLGVVRGCKVFTPAFKKQGHGHIVNVASMAGLLDVPLMSSYNATKAAVVSLSETLHNELAEHGIGVSVVCPSFFKTNLGDSLRTTDPRLGATMARLLERSAITADDIANDVFDAVAERGFYILPHADGRRAWRMKRLLPRELYAWVLRRNTRGMRPGAHSKAG

SEQ ID NO: 890 - DNA, 822 bp, Artificial Sequence
  Description of Artificial Sequence: Synthetic polynucleotide
atggccacccaacgcatcttcatcaccgggggcgcaagcggcctgggtaaggcgatcgcgctgcgtttcgcccgtgctggctggaaggtgtgtatcggcgacgttaacgatgcgcgcggcgaagaggcgcagaaggaactcacggccctagccccacaagcccatagtttgcgctgtgacgtcaggcgagaggaggacttgcgcgaagccctggactggttgaccgcgaggtggggtggcgtagatgtcgtgatcaacaacgcaggcgtggcacaggccggtgcgatcgaggatgtctcgatcgatgactggcaatggatcatcgacattaacctgctgggcgtggtccgcggctgtaaggtgttcacccccgcctttaagaagcaaggccatggccatatcgtgaacgtcgcgtctatggccggcctgctggacgtgccgctgatgtcctcgtacaatgcgaccaaggccgctgtggtcagcctgtcggaaaccctgcacaacgagctggccgaacatggcatcggcgttagcgttgtctgcccgtcgttcttcaaaaccaaccttggcgactcgctccgtacgacagacccgcgcctgggagccaccatggccagattgctggaacgctcggccatcaccgcggacgacatcgccaatgacgtcttcgatgccgtggccgagcgcggcttctacattttgccgcacgcagacggccgccgcgcctggcgcatgaaaaggctgctgcctcgcgagctgtatgcgtgggtactccgccgcaacacccggggaatgcgcccgggtgcgcatagcaaggccggc

SEQ ID NO: 891 - protein, 287 aa, Artificial Sequence
  Description of Artificial Sequence: Synthetic polypeptide
MKNFDNKVAVITGAGSGIGRSLALALAQRGARLALSDIDTAGVADTAGRCEKAGATAIPFELDVADRAAVYAHAADVKNEFGQVNLVFNNAGVALSADVKDMEWDDFDWLMNINFWGVAHGTKAFLPHLIESGDGHIVNVSSVFGLMGIPSQSAYNAAKFAVRGFTESLRQEIRAAKFPVGVTCVHPGGIKTNIASSARGIPDGVDRETVRKGFQLMAITRPDSAARIILRGVEKNRPRVLIGPDARVFDAIPRIIGPRYEDLMAPFYGMGRYGIGKKIAGRFGIEL

SEQ ID NO: 892 - DNA, 861 bp, Artificial Sequence
  Description of Artificial Sequence: Synthetic polynucleotide
atgaaaaacttcgacaacaaggtggccgtcatcaccggagctgggtcagggatcggacgctcgctggccctagcgctagcccagcgcggagcgcgcctggcgctgtccgatatagacaccgcgggtgtagctgataccgcgggccggtgcgagaaagctggcgcgaccgccatcccttttgagctagatgtcgccgaccgagctgccgtctatgcccatgccgccgatgtcaagaacgagttcgggcaggtcaacctcgtattcaacaatgccggggtggcgctctcggccgacgtgaaggatatggagtgggacgacttcgactggctgatgaacatcaacttctggggcgttgcccacggcaccaaggcgttcctcccgcacttgatcgaaagtggtgacgggcacatcgtgaatgtgtccagtgtattcggcctgatgggtatccccagccaatcggcctacaacgcggccaagtttgccgtgcgaggcttcacagagtcgctgcgccaagagattcgggcggccaagttccctgtcggcgtgacttgcgtgcacccaggagggatcaagaccaacatcgcctcctccgcaagaggcatccctgacggtgtggaccgcgagactgtccgcaagggcttccaacttatggccatcacccgccctgactcagccgcccgcataatcctacggggcgtggagaagaaccgtccacgcgtcttgatcggacccgacgcccgcgttttcgatgccatcccccgtattatcggccccaggtacgaagacctcatggcacccttctatgggatgggccggtatggcatcggcaagaagatcgcaggccgcttcggcatcgaactt

SEQ ID NO: 893 - protein, 278 aa, Artificial Sequence
  Description of Artificial Sequence: Synthetic polypeptide
MKDFSNKVAVITGAGSGIGRALALELALHGAVLELSDVDAEGLDSTVREARERGAEVRGHSLDVADRAAVLAHAEDVVREHGRVNLVVNNAGVALGATVEDMTFEDFDWLLGVNLGGVVNGTKAFLPHLIDSGDGYVVNISSVFGFVGVPTQSAYNAAKFAVRGFTESLREEMLAARHPVGVSCVHPGGIKTNIARNARGGAGGDQAKAAAGFDKIALTTPKKAAETILRGVRRRSARILIGPDAYVIDAIPRVLGSAYQRPLAVLARQGLKRVERNG

SEQ ID NO: 894 - DNA, 834 bp, Artificial Sequence
  Description of Artificial Sequence: Synthetic polynucleotide
atgaaggacttcagcaacaaggtcgctgtaatcacaggcgccggcagcgggatcggccgcgcgcttgcccttgagctggccctgcacggtgcggtgctggaattgagcgatgtggacgcagaaggattggactctacggtccgcgaggcccgcgagcgcggcgcggaagtacgcggccattccctcgatgtcgccgaccgcgccgccgtactggctcacgcggaagacgtcgtccgggagcacggccgcgtgaacctcgtggtgaataatgccggagtcgccctgggtgccaccgtggaagacatgacgttcgaggacttcgactggctcctgggcgtcaacctgggcggcgtcgttaacggcaccaaggcgttcctgccgcatctgatcgatagcggcgacggttacgtcgtgaacatcagctccgtgttcggcttcgtgggcgtgcccacccagtccgcctataacgccgcgaagttcgccgttcgcggctttacggaaagcctgcgcgaggaaatgctcgcggctcggcacccggtaggcgtcagctgtgtgcacccagggggcatcaagaccaacatcgcccgtaacgcgagaggcggtgcaggcggtgatcaagccaaagccgctgccgggttcgataagatcgcgctgaccacgccgaagaaggccgccgagaccatattgcgtggcgtccggagacgctccgccaggattctcatcggcccggacgcgtatgtgattgacgcgatcccccgcgtgctgggctccgcataccagagacccttggcggtgctcgctcgccaagggctgaaaagagtcgagcgcaacggg

SEQ ID NO: 895 - protein, 300 aa, Artificial Sequence
  Description of Artificial Sequence: Synthetic polypeptide
MKDFSNRVAVITGGASGFGKEFARIAADLGMKLVLADVQEDALDATVAEFQARNVPVIGLRTDVSRAEQVQALADAAIEAFGQVNLLFNNAGVGAGGLIWENSQQDWEWVLGVNLYGVVHGVRIFTPLMLAAAEKDPAFQGHIVNTASMAGLLNPPAMGVYNVSKHAVVALTETLYQDLGLVTEQVRCSVLCPYFVPTGISQSQRNRPAELANQAPPTRSQLVSQALSDKAVGAGKVTAAEVARITFDAIRDESFYIYSHPQALAPVRQRFEDIVGQHNPGDPFADKPEVRAGLVAALRG

SEQ ID NO: 896 - DNA, 900 bp, Artificial Sequence
  Description of Artificial Sequence: Synthetic polynucleotide
atgaaagacttctccaaccgcgtggcggtgatcaccggcggtgccagcggctttgggaaagagttcgcccgcatcgccgccgacctgggcatgaaactggtcctggccgacgtccaggaagacgccctggatgccaccgtcgccgagtttcaagcgcgcaatgtcccagtgatcggtttgcgtaccgacgtgtcgcgtgccgaacaggtgcaggccctggcggacgcggccattgaggcgttcggccaggtaaacctgctgttcaacaatgccggcgtgggtgcgggcggcctgatctgggaaaattcacagcaggactgggaatgggtgctgggggtgaacctgtacggtgtcgtccatggcgtccgtatcttcacaccgctgatgcttgctgctgcggagaaagatcccgccttccagggccacattgtcaataccgcgtccatggcgggcttgctcaacccgccggcgatgggtgtgtataacgtcagcaagcatgccgtcgtggccctcaccgagaccctgtatcaggacttgggcttggtcaccgagcaggtgcgctgcagcgtcctttgtccctacttcgtgcccaccgggatcagtcaaagccagcgaaaccgcccggctgagctggctaaccaagccccgccgacgcgttcccagttggtgagtcaggccctgtccgataaggccgttggggcgggaaaggtgaccgccgcggaggtggcgcgaatcaccttcgacgcgatccgggacgaatcattctacatttactcgcacccgcaggcgctggccccagtgcgccaacggttcgaggacatcgtcggccagcacaacccgggagatccgttcgccgacaagccggaagtacgcgctggccttgtcgccgctctccggggc

SEQ ID NO: 897 - protein, 302 aa, Artificial Sequence
  Description of Artificial Sequence: Synthetic polypeptide
MREEQARMRDFKGRTAVITGAGSGIGAALAHLAAREGMNLVLADINLADLEAVAASIDSPAIALQRTDVADPEAVQALADLAWSRFGEVSLLCNNAGVVPGGRHRLVWEYALEDWRWAFGVNMDGVVNGIRSFVPRMLAEGRPGHILNTASVAGFVSGEGSAVYGASKHAVVRITEALYAGLRERNAPIGVTMLCPGLVATRIYEAERSRPAHLRSSDGRPAEAAEFQSISDNLFQNAPSPEEVAAQAFDGIRNDQFYVFTTTRYDPVIAQRTQSILARENPLFDSLISLSKGKADAGEERS

SEQ ID NO: 898 - DNA, 906 bp, Artificial Sequence
  Description of Artificial Sequence: Synthetic polynucleotide
atgcgagaggagcaagcccgcatgcgcgacttcaagggccgcactgccgtgataacaggcgccgggagcggcatcggcgccgccctcgcccatctggccgcccgtgagggtatgaacctggtgctggcggacatcaacctggccgacctggaagctgtcgccgcctcgattgacagcccggcgattgcccttcagcgcaccgacgtcgctgaccctgaggccgtccaggctctcgccgacctggcttggtccaggttcggcgaagtctcgctcctctgcaataacgcgggggtcgtgccgggaggccgccatcgcctggtctgggagtatgcgctggaggattggcgatgggccttcggcgtcaacatggacggcgttgtcaacgggattcgcagcttcgtgccccgcatgctcgccgaaggtcgtcccggacacatactcaacacggccagcgtcgcgggcttcgtgtcaggtgagggctcggccgtctatggggcctcgaaacatgccgtcgtccgcattaccgaggccctctatgccggtctccgtgagaggaacgcgccgatcggagtgaccatgctttgtcccggactggtggccacccgaatttacgaagcagagcgtagtcgccccgcccatctgcgctcctccgacggtaggcccgccgaggcggcggagttccaatctatctccgacaacctgttccagaacgccccgtccccggaagaagtggcagcgcaggccttcgacggcatccggaatgaccaattctacgtcttcaccacgacgcgttatgaccccgtgatcgcacagcgcacccagagcatactggcccgcgagaatccgctgttcgacagcttgatcagcttgagcaaggggaaagccgacgcgggcgaagagcgttct

SEQ ID NO: 899 - protein, 282 aa, Artificial Sequence
  Description of Artificial Sequence: Synthetic polypeptide
MKHLEGKTAFVTGAASGIGLGIATALAQAGVKVMLCDIEKAALDKAVATLRETNADVDGVVADVSLKDNLQRAADETIARFGKVHILVNNAGVGGGGDYGTWNDAGWNWVVGVNLMSVVWGIEIFGPLIEAHGEGGQIVSTASIAGMVALTNPAYDVTKFGVVALSEDLRPKLAARGIGVSVLCPGVIRTNIVDSGRNIPSRFAGQIQTVPTEGPGTEILKAVTEAIASGIDPLYVGELVREAIENDWPHIFTDMQFEPHIEARFAAIKEGFDRIRDRVPRY

SEQ ID NO: 900 - DNA, 846 bp, Artificial Sequence
  Description of Artificial Sequence: Synthetic polynucleotide
atgaagcacctggagggcaagacagcctttgtcactggcgccgcgtctggtatcggtctcggcatcgccactgcgctggcccaagcgggcgtcaaggtgatgttgtgcgacatcgagaaggccgcgctggacaaagccgtagccacactgcgtgagacgaacgccgacgttgatggcgtggtcgcggatgtgagcttgaaggacaacctgcagagggctgctgacgaaaccatcgcgcgcttcggcaaggtgcacatcctggtcaacaacgcgggtgtcggcggcggcggggattacggtacttggaacgacgccggctggaactgggtcgtgggtgtcaatctaatgagcgtagtctggggcatcgaaatctttggaccgttgatcgaggcgcacggcgaagggggtcagatcgtgtccaccgcgtctatcgcgggcatggttgcgctgaccaacccggcgtacgatgtgacgaagttcggtgtggtcgcactgtctgaagacctccgaccgaaactggctgcccgtggcatcggcgtgtcagtgctgtgtcccggcgtcatccgcacaaatatcgtcgactcgggccgcaacatcccgtcccgatttgccggccagatccagaccgtccccaccgagggtcccggtaccgagatactgaaggccgtgaccgaggccatcgccagtggcatcgaccccctttacgtgggagaactggtccgggaagcgatcgagaacgactggccgcacattttcaccgacatgcaattcgaaccgcatatcgaggcgcgcttcgccgcgatcaaggagggcttcgatcgcatccgcgatcgcgtcccccgttac

SEQ ID NO: 901 - protein, 265 aa, Artificial Sequence
  Description of Artificial Sequence: Synthetic polypeptide
MKVAVITGAASGIGAGLAKKAVALGMQVVVADRDQAGLEKVVLELGDQALAVVTDVTSQASLDALADKAYAAFGQVDLLFNNAGVLSTGNSWEISDARWQQAWQVNVNGIVNGLRAFVPRLLKAERPARIINTASVGGFLPSAMMTPYSATKFAVVALTEGLAGELAAINPQIKVSLLAPGPVKTAIFREAPDAASAQFHGMMTHMLDENGLDTEEFAERVFAAIERGEYWIVPQPEMLDPLLKARNKLIETRADPVLSWARETA

SEQ ID NO: 902 - DNA, 795 bp, Artificial Sequence
  Description of Artificial Sequence: Synthetic polynucleotide
atgaaggtcgcagtcatcaccggcgccgccagtggaatcggtgcgggcctggcgaagaaggcagttgcactcggtatgcaggtggtggtcgccgatcgcgaccaggccggcctcgaaaaggtggttctggagctgggcgatcaggctctcgccgtcgtgacagacgtcacttctcaagcgtcgctggacgccttggccgataaagcatacgcagccttcgggcaggtcgatctgctgttcaacaacgccggggtcctgtcgactggtaactcctgggagatctccgacgcgcgctggcaacaggcgtggcaggtaaacgtgaacggaattgtcaacggcctccgcgcgtttgttccccgcctgctgaaggctgaacggccggcccgaattatcaataccgcttcggtgggaggcttcctgccgtcggctatgatgactccgtactcggcgaccaaattcgccgtggtagccctcacggaagggctggcgggcgaactggccgcgatcaacccgcagatcaaggtcagcctcttggctccaggcccggtcaagaccgcgattttccgtgaagcccctgacgccgccagcgctcagttccacggcatgatgacccacatgctggacgaaaacggcctggacaccgaagagtttgccgagcgcgtgttcgccgccattgaacgcggggagtactggatcgtaccccaaccggagatgctggaccctctcctgaaggcgcgaaacaagctcatagaaacccgcgccgacccggtcctgtcgtgggcgcgtgaaaccgct

SEQ ID NO: 903 - protein, 521 aa, Artificial Sequence
  Description of Artificial Sequence: Synthetic polypeptide
MRTHSAVPGNTALITGGASGIGLGIAEALLDRGMNVVVADVRDDHLAHAQDHLRRHGSRLMPRQLDVTDRQAWLDAVEATGDRFGAVDVLCLNAGIGVLGTILRSRPADWEWLMGVNLEGVTNGLETVLPVMRARGAGGHVVATSSAGGLMVASDGGVYSSAKFGVIAVMDCLRTELSAEGIGVTTLCPSAVNTNIHDHETMRPAAYRDSGLRGDDIERARVQHAARELLSKGADPRDVGKRVLDAIDEDAPMVFTDGGIAPVVTMRRDALMRAVRLATPARKTSRLERVVLAEPVGATRAGRALTALGCQVDVLDMKMVDTVMEEPEQLGDPSDAAPLVLAIAPQSPGGSRSVDWTAQVHQALRRCFTIIRGLAPGRVASPGGAGVAVVLPTTALFADSARCADSVLGRSLVGLTEGLRAELLATGLAVTLVLTHEDEEEAVLAKRIHEALRDGPLYALPSSATDERITSVFDPWLEALARTPSDLALPPLGPMGEVYRLEAEGTKAPDQSSSSAPQNTG

SEQ ID NO: 904 - DNA, 1563 bp, Artificial Sequence
  Description of Artificial Sequence: Synthetic polynucleotide
atgcggacccacagcgccgtgcccggcaacaccgccctgatcaccggcggcgccagcggcatcggcctcggcatcgcggaagcgctgctcgaccggggcatgaacgtggtcgtggccgatgtgcgggacgatcacctggcccatgcccaggaccacctgcgccgccacgggtcccgtctgatgccgcgccagctggacgtgaccgaccgccaagcgtggctggatgccgtcgaggcgaccggtgaccgtttcggcgcggtcgacgtcctgtgcctgaatgccggcatcggcgtgctgggtaccatcctccgcagccggcccgccgactgggaatggctcatgggcgtcaacctggagggcgtcaccaacgggctggagaccgtgctgccggtgatgcgtgcccgtggcgcgggcgggcacgtggtggcgaccagctcggccgggggcctcatggtcgcgtccgacggcggggtgtattcgtcggccaagttcggcgtgatcgcggtgatggactgcctccgtacggagctgtcggccgaaggcatcggtgtcaccaccctgtgtccgtcggccgtgaataccaacatccacgaccacgagacgatgcgccccgcggcgtatcgggacagcggcctgcgcggcgacgatatcgagcgcgcccgcgtgcaacatgccgcccgcgagctgctcagcaaaggtgccgacccgcgtgacgtgggcaagcgcgtgctggacgccatcgacgaggatgcccccatggtgttcaccgatgggggtatcgcgcccgtcgtcaccatgcgccgcgacgccctgatgcgcgccgtgcgtctggccacccccgcccggaagacctcccgtctcgaacgtgtcgtgctcgccgagccggtcggcgcgacccgcgccggtcgggcgctcaccgccctcggctgccaggtggacgtgctcgacatgaagatggtcgacaccgtgatggaagagccggaacagctcggcgacccctcggacgccgcccccctggtgctcgccatcgccccgcaaagcccgggcggctcccgctcggtcgactggaccgcccaggtgcaccaggccctgcggcgttgtttcacgatcatccgggggctcgccccgggccgcgtcgcgtcgcccggcggtgccggggtcgcggtcgtgctgcccaccaccgccctgttcgccgattccgcgcgctgtgccgactccgtgctgggccgctcgctggtcggcctgaccgaaggtctgcgtgccgaactgctcgccaccggcctggcggtcaccctggtgctgacccatgaggacgaggaggaggccgtgctggcgaaacgcatccatgaggcgctgcgggatggcccgctgtacgccctcccgagctcggccaccgacgagcgcatcaccagcgtgttcgatccgtggctggaggccctggcccgcaccccctccgatctggccctgcccccgctgggcccgatgggcgaagtctatcgcctcgaagccgagggtacgaaggcccccgatcagtcctcgtccagcgcgccgcagaacaccggc

SEQ ID NO: 905 - protein, 300 aa, Artificial Sequence
  Description of Artificial Sequence: Synthetic polypeptide
MKQFAGGVAVITGGASGFGKEFAKLGAGLGMKLVLADIQQDALDAAVAGFKAQGVEAIGVRVDVSRVEDVQALADAAIRAFGKVNLLFNNAGVGAGGLIWENTQKDWDWVLGVNLHGVIHGVRIFTPLMLAAAAKDPAYEGHIVNTASMAGLLNAPAMGIYNVSKHAVVALTESLYQDLSLVTGQIHCSVLCPYFVPTGITQSHRNRPQDLANAAPPTRSQLVAQAMTDKAVNSGKVTAEQVGQMTFDAIRHEHFYIYSHPHALGPVQHRFEDIVSQRNPSDPFEGKPDVRARLVEALRG

SEQ ID NO: 906 - DNA, 900 bp, Artificial Sequence
  Description of Artificial Sequence: Synthetic polynucleotide
atgaagcagttcgcgggtggcgtcgccgtgattacgggcggggcctcgggcttcgggaaggagttcgccaagctgggcgcaggcctcggcatgaagctggtactggccgacatccaacaggatgcgctggatgcggccgtcgctggcttcaaagcccaaggtgtcgaagccatcggcgtgcgggtcgacgtcagccgcgtcgaagacgtccaggcgctcgcggacgccgccatccgcgccttcggtaaggtcaacctgctcttcaacaatgccggagtcggtgcgggaggcctcatttgggagaacacccaaaaggactgggactgggtcctgggcgtcaacctccatggcgtcatccacggagtccgcatcttcaccccgctcatgctggctgctgccgccaaggacccggcctacgagggccatatcgtcaacacggccagcatggcgggcttgctcaacgctccagcaatgggaatctacaacgtctccaagcacgccgttgtcgcgctcaccgagtccctgtaccaagacctctcgctggttaccggccagattcactgcagcgtcctgtgcccctacttcgttccgaccggcatcacccagtcgcaccgcaaccgtccgcaggacttggcaaacgcagccccgccgacccggagtcaactcgtcgcccaagcaatgaccgataaggccgtcaactccggcaaggttaccgcggaacaagtgggccagatgaccttcgatgccatccggcacgaacacttctatatctactcccacccgcacgcactgggcccggtccaacaccgcttcgaggacatcgtgagccagcgcaaccccagcgaccccttcgagggcaaaccggacgtccgcgcccgcctggttgaggccttgcgcgga

SEQ ID NO: 907 - protein, 281 aa, Artificial Sequence
  Description of Artificial Sequence: Synthetic polypeptide
MKVFKDKVAIITGAASGIGSAIAERCAYEGMKVVLADIDEGALRNTEKVIKSIGVETLSVRCDVSKENDIRVLAEKTLEAFGEVCLLFNNAGVATGTLLWENTTADWQWVLGVNLWGLINSTKTFVPIMLKQNKECHIVNVASIAGFTACPGNGIYSVSKHAIVNFSETLYYEMKLANAPIDVSVVCPGFVNTQLMNSERNRPSDLMNSLDSTSYGPQKQMFEKIFHDGVLSGISPEQVVEEIFQAIPNKKFYILTHKESKDLIRKRMEDILNENNPTIYF

SEQ ID NO: 908 - DNA, 843 bp, Artificial Sequence
  Description of Artificial Sequence: Synthetic polynucleotide
atgaaagtgtttaaggacaaggtggctatcattaccggagccgcttccgggattgggtcggccatcgccgagcgttgcgcgtatgagggaatgaaggtagtcttggcagacatcgacgagggcgcgttgcgcaataccgaaaaggtgatcaagtccatcggggtggagactctcagcgtgcggtgcgatgtcagcaaggaaaacgacatccgtgtgctggccgagaagaccctggaggcgtttggggaagtctgtctgctcttcaacaatgcgggagtcgccaccggtacgctgctgtgggaaaacacgactgcggactggcaatgggtgctgggtgtgaacctgtggggcctgatcaacagtaccaagacgttcgtgccgatcatgctgaagcaaaataaggagtgccatattgtcaacgtggccagcatcgccggcttcaccgcatgtccgggcaatggcatctacagcgtcagcaagcatgcgatcgtcaacttcagcgaaaccctgtactacgagatgaaactggcgaacgcgcccatcgacgtgagcgtcgtctgccccggcttcgtcaacacccaactgatgaactccgaacgtaaccgccctagcgatctcatgaactcgctcgactccacctcctacggaccccagaagcagatgttcgaaaagatcttccacgacggtgtcttgtcgggtatctcccctgagcaggtcgtcgaagagatcttccaggcgatcccgaacaagaaattctacatcctcacccataaggagtcgaaggacctcatccgcaaacgcatggaggatatcctgaatgaaaacaaccccactatctatttt

SEQ ID NO: 909 - protein, 300 aa, Artificial Sequence
  Description of Artificial Sequence: Synthetic polypeptide
MKQFAGGVAVITGGASGFGKEFAKIGAGLGMKLVLADIQQDALDAAVAEFSAQGVEVIGLRVDVSKVEDVQALADAAIKAFGKVNLLFNNAGVGAGGLIWENTERDWDWVLGVNLHGVIHGVRIFTPLMLEAAKKDPSYEGHIVNTASMAGLLNAPAMGIYNVSKHAVVALSESLYQDLSLVTEQIHCSVLCPYFVPTGITQSDRNRPQDLANTAPPTKSQLVSRAMSEKAVSSGKVTAEQVGQMTFDAIRNAGFYIYSHPHALAPVQHRFEDIVSQRNPSDPFEGKPDVRARLVDALRG

SEQ ID NO: 910 - DNA, 900 bp, Artificial Sequence
  Description of Artificial Sequence: Synthetic polynucleotide
atgaaacagtttgcgggtggcgtcgcggttatcaccggcggcgccagcggcttcggcaaggagttcgccaagatcggcgcagggctcggcatgaagctcgtcttggcggacatccaacaggacgcgctggacgcggctgttgccgagttctcggcccagggtgttgaagtaatcggcctgcgggttgatgtgtccaaggtcgaggatgtccaggccttggcagacgctgccatcaaggccttcggcaaggtcaacctgctgttcaacaacgcgggcgtaggcgcgggcggcctcatttgggagaacaccgagcgcgactgggactgggtgctcggggtcaacctgcatggtgtcattcacggcgtccggatcttcaccccgctgatgctggaagcggccaagaaggacccatcgtatgagggccacatcgtgaacaccgcgagcatggcgggcctcctgaacgccccggccatgggcatttacaacgtctcgaagcacgcagtggtggccctgagcgagagcctctaccaggacctcagcctggtgactgagcagatccactgctcggtcctctgcccgtacttcgttcccaccggcatcacccagtccgaccgcaaccgtccccaggacctggccaataccgcgcctcccacgaagtcccagctggtctcccgggccatgtccgagaaagccgtatcctcgggcaaggtgaccgctgaacaggtgggccagatgaccttcgatgcgatccgcaatgcggggttctacatctactcgcacccacacgccctggcaccggttcagcaccgcttcgaggatatcgtgagccagcgcaatccctcggacccgttcgaaggcaagccggacgtacgggcgcgcctcgtggacgccctgcgcgga

SEQ ID NO: 911 - protein, 288 aa, Artificial Sequence
  Description of Artificial Sequence: Synthetic polypeptide
MKDFRGRVAVITGAGSGIGRALGVNLAKRGAQLALSDINLENVTETALLCEKEGAKAIPYQLDVADRDAFHAHADEVVAEFGKANFIANNAGVALGADVIDTSWEDHDWLMGINLNGVINGTKAFLPKLIEAGEGHIVNISSVFGLMGIPSQAAYNAAKFGVRGYTEALRQELRIARSPVSATCVHPGGIKTNIVRNGRGVERPGMTIDEAAKGFELIALTTPERAAQVILRGVERDRARVLIGPDARIFDLIPRVLGPRYQDIVGFFGPLAYQLAEKPWAAKLVNRL

SEQ ID NO: 912 - DNA, 864 bp, Artificial Sequence
  Description of Artificial Sequence: Synthetic polynucleotide
atgaaagacttccgcggtcgtgtagcggtaatcacgggcgccggctcgggtattggccgcgccctcggcgtcaacctcgccaagcggggcgcacaactcgccctcagcgacatcaacctggaaaacgtgaccgagaccgccctgctgtgtgagaaggagggcgccaaggccatcccctaccagctggatgtggccgaccgcgacgcgttccacgcacatgccgatgaagttgtggccgagttcggcaaggccaacttcatcgccaacaacgccggtgtggccctcggtgcggacgtgatcgacaccagctgggaggatcacgactggctcatgggcatcaatctcaacggcgtcatcaacggcacgaaggcctttctgccgaagctgattgaggccggagagggccacatcgtgaacatcagttcggtgtttggcctcatgggcatcccgtcgcaggcagcctacaacgccgccaagttcggggtgcggggctataccgaggcgctgcgccaggagctgcgcatcgcccggtccccggtctcggcgacttgtgtccacccgggcggcatcaagaccaacatcgttcgcaatgggcgcggcgtcgaacgcccaggcatgaccatcgacgaggccgccaagggcttcgagctgatcgccctgaccacccctgagcgcgccgcgcaggtgatcctgcgtggtgtcgaacgtgatcgcgctcgcgtactcatcggcccggacgcgcgtatctttgacctcatcccgcgtgttctgggcccgcgctaccaagacatcgtcggcttcttcgggccgttggcctatcaactcgcggagaaaccatgggccgcgaagctggtgaaccgcctg

SEQ ID NO: 913 - protein, 295 aa, Artificial Sequence
  Description of Artificial Sequence: Synthetic polypeptide
MKSFENKVAAITGAGSGIGRALAVELGRQGCHLALADVNAAALEETRQLLASSGVRVSTAVVDVADREQVQAWADKAASEHGRVNLIFNNAGVAHAGTVEGSDYSEYEWIMNINFWGVVNGTKAFLPHLKASGNGHVVNVSSVFGLFAQPGMSAYNATKYAVRGFTESLRQELDMEDSGVSASCVHPGGIKTNIAKTARMNESMAKVTGQAPDKAREQFNDQLLRTTPEKAAQVILRGVQRDSRRILIGTDAHAIDVMLRLAPVLYQRLVTASMRLAARFAPRPKSPQGAREASE

SEQ ID NO: 914 - DNA, 885 bp, Artificial Sequence
  Description of Artificial Sequence: Synthetic polynucleotide
atgaagtcgtttgaaaataaggtggccgccatcaccggcgcgggctcgggaatcggtcgggcactcgcggtggagttgggccgtcaggggtgtcatctggccctggcggacgtgaacgccgctgccctcgaagagacccgtcagctgctggcctcctccggcgttcgcgtgagtaccgccgtcgtagacgtcgcggatcgcgaacaggtgcaggcgtgggcagacaaggccgcctcggagcacggccgcgtgaatctcatcttcaacaatgcgggggtcgcccacgcgggcaccgtcgaaggctcggactacagcgagtatgaatggatcatgaacatcaacttctggggcgtggtgaacggtaccaaggcgttcctcccccatctcaaggcgtcgggaaacgggcatgttgtgaacgtctccagcgtcttcggactgttcgcccagcccgggatgagcgcgtataacgccactaagtacgccgtgcgcggcttcaccgaatccttgcggcaggagctcgacatggaagactcgggagtctccgccagctgcgtgcaccctggcggcattaagacgaacatcgcaaagactgcccgcatgaacgagagcatggcgaaagtgaccggccaggcccctgacaaggcgcgcgaacagttcaatgaccagttgctccgtaccacccccgagaaggccgctcaggtcattctgcgcggcgtacaacgcgattcccggcgcatcttgatcgggaccgacgcccatgcgatcgacgtcatgttgcggctcgcccctgtgctgtaccagcgcctggtcactgccagcatgcgcctcgccgctcgctttgcccctcgcccgaagtcgccacagggcgcccgtgaagcctcggaa

SEQ ID NO: 915 - protein, 305 aa, Artificial Sequence
  Description of Artificial Sequence: Synthetic polypeptide
MIQQFAGRTAVITGAGSGFGLEASRIAAREGMKLVMADVQADALERAVAEIEALGAEVLPFRLDVAQAAEVEALGAATLARFGAPHLVFNNAGVGAGGLIWEHTLKDWEWVIGVNLMGVAHGVRVFTPMMLAAAAQDAGYEGHIVNTASMAGLLNTPNMGVYNVTKHAVVSLSETLYQDLRLVTERVGASVLCPYFVPTGIGDSHRNRPTALRGQRATQSQRVAHAMIGKAVESGRVSAAQVAQFVFDAVREGRFYIYSHPQALAGVRARMEDIVQGRNPSDPYEARPDLGQQLKAALRLATSSD

SEQ ID NO: 916 - DNA, 915 bp, Artificial Sequence
  Description of Artificial Sequence: Synthetic polynucleotide
atgatccaacagttcgctggccgcaccgccgtcattaccggagcgggtagcgggttcggtctcgaagccagccgcatcgccgcccgcgaaggcatgaagctggtgatggcagacgtccaggccgatgccttggagcgcgcggtcgccgagattgaggccctgggcgccgaagtactgccgttccgtttggacgtggcccaagccgcggaagtggaggcgctcggggccgcgacgctcgcccggttcggcgccccacacctcgtgttcaataacgcaggcgtaggcgccggcggcctgatctgggaacatacgctgaaggactgggagtgggtgatcggcgtgaacctgatgggcgtggcccatggcgtgcgggtctttaccccgatgatgctggcggctgcggcccaggatgctggctatgaaggccacatcgtgaacaccgccagtatggcaggtctgctgaacacccccaacatgggcgtctacaacgtcacgaagcatgcggtggtctcgctgagcgaaactctgtaccaggacctgcgcctggtaaccgaacgggtgggagcgtcggttctctgtccgtacttcgtccctaccggtatcggcgactcccatcgtaatcgccctacggcgctgcgcggccagcgcgccacgcagagccagcgtgtggcccacgccatgatcggcaaggcggtcgagtccggacgggtctccgctgcgcaggtcgcccagttcgtcttcgacgcggtgcgcgagggccggttctatatctacagccacccacaggccctggcgggcgttcgcgcacgcatggaggacatcgtccaaggccgcaacccctccgatccgtacgaggcccgccccgacctgggccagcagctcaaagccgccttgcgcctggcgaccagcagcgac

SEQ ID NO: 917 - protein, 300 aa, Artificial Sequence
  Description of Artificial Sequence: Synthetic polypeptide
MKQFAGGVAVITGGASGFGHAFAKLGAGLGMKLVLADIQQDALDAAVAGFKAQGVEVIGVRVDVSRVEDVQALADAAIRAFGKVNLLFNNAGVGAGGLIWENTQKDWDWVLGVNLHGVIHGVRIFTPLMLAEAAKDPAYEGHIVNTASMAGLLNAPAMGIYNVSKHAVVALTESLYQDLSLVTGQIHCSVLCPYFVPTGITQSHRNRPQDLANAAPPTRSQRVAQAMTDKAVSSGKVTAEQVGQMTFDAIRHEHFYIYSHPHALGPVQHRFEDIVSQRNPSDPFEDKPDVRARLVEALRG

SEQ ID NO: 918 - DNA, 900 bp, Artificial Sequence
  Description of Artificial Sequence: Synthetic polynucleotide
atgaagcagttcgctggcggcgtcgcggtcatcacgggcggcgctagcggattcgggcatgcgttcgcaaaactgggcgcgggtctgggaatgaagctcgtcctggcggacatccagcaggacgctctggacgccgcggttgccggctttaaagctcagggcgtcgaggtgatcggggtgcgtgtcgacgtgtcccgtgtcgaagacgtgcaggccctggcggacgcagccatccgcgcgttcggcaaagtgaacctgctcttcaacaacgccggagtgggggccggcggattgatttgggaaaacacccagaaggactgggactgggtcctgggcgtcaacctgcacggtgtcatccacggggttcggatcttcactccgctcatgctggcagaagctgcgaaggacccggcgtacgaaggccatatcgtgaataccgccagcatggcgggcttgctcaacgcccccgcgatgggcatctataacgtcagcaagcatgcggtggtggccctcaccgaatccctgtatcaggacctgtccctggtgaccggccagatccactgttcggtgttgtgcccttacttcgttccaaccggcatcacccaaagccaccgcaatcgtccccaggacctcgcgaacgcggccccgccaactcgcagtcagcgtgtcgcgcaggccatgactgacaaggccgtttcgtccggcaaggtgaccgcggaacaagtaggccagatgaccttcgacgccatccggcacgaacatttctacatctatagccacccgcacgccctgggccccgtccaacatcgctttgaggacatcgtatcccagcggaacccctccgatcctttcgaggacaagcctgatgtgcgcgcccgcctggtggaagccctgcgcggg

SEQ ID NO: 919 - protein, 311 aa, Artificial Sequence
  Description of Artificial Sequence: Synthetic polypeptide
MSRLFDWVFYGVGMKEFKDKVAVITGAASGIGRGMAEVFAAVGMKVVLSDVEQPALEATTRLLRAAGADVHSVLCDVSKADQVDELARQTLCKYGAVHVLCNNAGVGVRASPSWVNSLNDWNWILGVNLMGVVHGLRSFLPIMIEQGTEAHIVNTASTAGLISDDNTLYGVSKSAVVALSEGVYWELRHGRFKPKISLLCPGCVDTNILASQRNRPLDLASDSSISADPAARVVQDWYAEQLKQGLTPRMVGKQVLAAIRDEHFYIMTHGEDYHPYIERRMKDILSASNPTFLPPRGIASLMQKLNALGTR

SEQ ID NO: 920 - DNA, 933 bp, Artificial Sequence
  Description of Artificial Sequence: Synthetic polynucleotide
atgtcgcgtctcttcgactgggtcttctatggtgtaggcatgaaggagtttaaggataaggtcgccgtcatcaccggcgcggcaagcggtattggccgtggcatggccgaagtctttgccgccgtgggcatgaaggtggtgctgagcgatgtggaacagccggctctggaggcgaccacccgtctgttgcgcgcggcaggcgcagacgtgcactcggtgctgtgcgacgtgagcaaagccgaccaggtcgacgaactggctcgccagaccctgtgcaagtacggcgcagtccacgtgctgtgcaataatgccggcgtcggagtacgcgcctcgccgtcgtgggtgaatagcctgaacgactggaactggatcttgggcgtgaacctgatgggcgtggtgcatggcctgcgttcctttctgcccatcatgatcgagcagggcaccgaagcgcatatcgtgaacactgcctccaccgccggactcatctccgacgacaacactttgtacggagtctcgaagtccgcggtcgtcgcgctgtcggagggggtatactgggagctccggcatggccgcttcaaaccgaagatctccctgttgtgcccgggctgtgtcgacactaacatcctggcctcgcaacgcaaccgcccgctggacttggctagtgacagcagtattagcgccgatccggccgcccgcgtggtccaggactggtatgccgaacagctgaagcagggcctcaccccgcgcatggtggggaagcaagtactggccgccatccgggacgaacacttctatatcatgacccatggagaggactaccacccctatatcgaacgccgcatgaaggacatcctgagcgcgtcgaacccaaccttcctgcctccccggggtatcgccagcctgatgcaaaagctgaatgccctcggcacccgg

SEQ ID NO: 921 - protein, 287 aa, Artificial Sequence
  Description of Artificial Sequence: Synthetic polypeptide
MKDFTNKVAVITGAGSGIGRNLALSLAEQGAQLALSDIDTSALADTAGRCEKVGAKAVPFELDVAQRPAVYEHAKNVVSEFGRVNLVFNNAGVALSADVADMDWDDFEWLMGINFWGVAHGTKAFMPHLIASGDGHIVNVSSVFGFVGIPSQSAYNAAKFAVRGFTEALRQELRAARHPVGVTCVHPGGVKTNIAGHARGLPDGSDPETLSRLFHRIAFTSPESASRAILRGVKKNKPRVLIGPDARVFDAIPRILGPRYEDIMASFYRTGRYGAGRRLAERLGLPR

SEQ ID NO: 922 - DNA, 861 bp, Artificial Sequence
  Description of Artificial Sequence: Synthetic polynucleotide
atgaaagacttcacgaacaaggtcgccgtcatcaccggcgcgggctcggggatcggccgcaatctcgccttgagcctggccgaacagggggcccaactggcgctgtccgacatcgacacttcggccctggcggacactgccggtcgctgcgaaaaggtcggggcgaaagcagtgccgttcgaactggacgtcgcccagcgcccagccgtatacgaacacgccaagaacgtcgtaagcgagttcggccgggtcaacctggtgttcaacaatgccggagtcgccctgagcgcggacgtagccgatatggactgggacgacttcgaatggctcatgggcatcaacttttggggcgtcgcgcatgggaccaaagcgtttatgccgcatctgatcgcgtccggcgacggccacatcgttaacgtcagcagcgtgttcggcttcgtgggcatcccttcccagtcggcctacaatgccgccaagttcgcggtccgcggttttaccgaggccttgcggcaggagctgcgcgccgcccggcaccccgtgggtgtaacctgcgtccaccctggcggggtcaagaccaacatcgcgggccatgctcggggcctgccagacggaagcgacccggaaacgctgtcgcgtctgttccaccgcatcgccttcaccagtcccgagagcgcaagccgcgcgatcctgcgtggggtgaagaagaacaagccgcgtgtgttgatcggaccggatgcgcgtgtcttcgacgccattccacgcatcctgggcccccgctacgaggacatcatggccagtttttaccgcacgggtcgctatggcgccggccgccgtctcgccgagcgcctggggctgccgcgg

SEQ ID NO: 923 - protein, 279 aa, Artificial Sequence
  Description of Artificial Sequence: Synthetic polypeptide
MKNFKDKVAVITGAGSGIGRALAMELAASGAKLAISDINEAGLKETANNLNLGEDRLMTKILDVADRQAFYDFADDVVNHFGQANMIFNNAGVALGATVEDMNYDDFEWLMNINFWGVVYGTKAFLPYLKQAGEGHIINVSSIFGLVGIPTQSAYNAAKFAVRGFTESLRIELEMEGSPVSCTSIHPGGIKTNIAKAARMSDGVERITGASKEQSIQDFEKMFRTTPEEAASTILKGVRGNKRRVLIGSDAVAVDTMQRLLPTSYQKLIAMGQKYMSKK

SEQ ID NO: 924 - DNA, 837 bp, Artificial Sequence
  Description of Artificial Sequence: Synthetic polynucleotide
atgaaaaacttcaaggacaaggtcgccgtgatcacgggcgccggtagtgggatcggccgggccctcgcaatggagctggccgccagcggggctaagctcgcgatcagtgacatcaacgaagcgggcctgaaggagacggcgaacaacctgaacctgggcgaggatcgtctgatgaccaagatcctggacgtggcggaccggcaagcgttttacgacttcgcggacgatgtggtcaaccacttcgggcaggcgaatatgatcttcaacaacgcgggcgtagcgctgggcgccactgtggaagacatgaactacgatgacttcgagtggttgatgaacatcaatttctggggcgtcgtctacggcacgaaggccttcctgccttatctgaagcaggcgggcgaaggccacatcatcaacgtgagcagcatcttcggactcgtcggcatcccgacccagagcgcctataatgccgcaaagttcgccgtgcgcggattcacggagtccctccgcatcgagttggaaatggagggctcccccgtatcgtgcacctcgatccatccgggcggcatcaagaccaacatcgcaaaggcggcgcgtatgtccgacggtgtcgagcgtattaccggggcgagcaaggaacagtcgatccaagacttcgagaagatgttccgcacgaccccggaggaagccgcctcgaccattctgaagggagtgcgcggaaacaaacgccgcgtgttgatcggcagcgacgcggtcgccgtggataccatgcagcgtctgctgccgaccagctatcagaagctcatcgccatgggccagaagtacatgagcaagaag

SEQ ID NO: 925 - protein, 300 aa, Artificial Sequence
  Description of Artificial Sequence: Synthetic polypeptide
MKDFSNKVAVITGGASGFGKEFAHIAADLGMKLVLADVQEDALDATVAEFKARNVPVIGLRTDVSRADQVQALADAAIEAFGQVNLLFNNAGVGAGGLIWENSEKDWEWVLGVNLYGVVHGVRIFTPLMLAAAEKDPAYQGHIVNTASMAGLLNPPAMGVYNVSKHAVVALTETLYQDLGLVTEQVRCSVLCPYFVPTGINQSQRNRPADLANQAPPTRSQLVSQALSDKAVGSGKVTAAEVAQLTFDAIRDESFYIYSHPQALAPVRQRFEDIVGQRNPGDPFADKPEVRAGLVAALRG

SEQ ID NO: 926 - DNA, 900 bp, Artificial Sequence
  Description of Artificial Sequence: Synthetic polynucleotide
atgaaagacttctccaacaaagtcgcggtcatcaccggcggggcctccgggttcggcaaggagttcgcccacatcgccgcggacctcggcatgaagctggtgctcgctgacgtccaggaagacgcgctcgacgccaccgtggccgagttcaaagcccgcaacgtccctgtgatcggcctgcgcactgacgtgagccgcgccgatcaggtccaggccttggcggacgcggccatcgaggccttcggccaggtgaatctcctgttcaacaacgcgggcgtgggcgccggcggactgatttgggaaaacagcgagaaagactgggaatgggtcctcggcgtcaacctgtacggtgtggttcatggcgtccgcatcttcacgcccctcatgctcgcggctgccgagaaggaccccgcatatcaagggcacatcgtcaacaccgcctccatggcggggctgctgaatccgccggccatgggtgtgtacaacgtcagtaagcacgcggttgtcgccctcaccgagaccctgtaccaagacctgggcctcgtcaccgaacaggtgcgctgcagcgtcctctgcccgtactttgtcccgaccggtatcaaccagagtcaacgcaatcgtccggccgatctggccaaccaagcaccgcccacccggtcccagctggtatcccaggcgctgagcgataaggcggttggctcgggaaaggtcaccgcggcggaagtagcgcagctgaccttcgacgccatccgggacgagtccttctacatctactcgcacccgcaggcgttggctccggtgcgccaacgtttcgaggacattgtcggccagcggaacccgggcgacccgttcgccgacaaaccagaagtccgcgccgggctggtagcggcgctgcggggc

SEQ ID NO: 927 - protein, 302 aa, Artificial Sequence
  Description of Artificial Sequence: Synthetic polypeptide
MKNFTNRVAVITGGASGFGREFALIGARLGMKLVLADVQQDALDSVKAELEALGAEVLAVRCDVRHADQIQALADATMARFGAVHLLFNNAGVGSGGLVWENTQADWEWVLGVNLWGVIHGVRIFTPLMLECAKTDPEYEGHIVNTASMAGLLNAPTMGVYNVSKHAVVSLTESLYQDLRLVEAPISASVLCPYFVPTGISQSHRNRPDDVANAARPTISQLAAQAMSDKAVSSGKVSAAAVAEMTFAAIGSDQFYVYSHPQALGHVQKRMEEIITQTNPGDPYAGAEHVREMLQAKLKAGA

SEQ ID NO: 928 - DNA, 906 bp, Artificial Sequence
  Description of Artificial Sequence: Synthetic polynucleotide
atgaagaactttacgaaccgcgtggccgtgatcaccggcggcgcatccggcttcggtcgcgagttcgccctgatcggcgcccgtctggggatgaaactggtcctggccgacgtccagcaggacgcgttggattcggtcaaggccgaactcgaagctctgggtgccgaagtactggcggtacgctgcgacgtccgtcacgccgatcagattcaagccctggcggacgcgaccatggcgcgttttggtgccgtgcatctgctgtttaacaacgcgggtgtgggaagcggcggactggtgtgggagaacacccaggctgattgggaatgggtgctgggcgtcaacctctggggcgtgatccacggcgtacgcatcttcaccccgctgatgctggaatgcgccaagaccgacccggagtacgagggccacatcgtgaacactgcctccatggcgggcctcctgaacgcgccgaccatgggcgtctataacgtgagcaagcacgccgtcgtgtcgctcacggagagcctctatcaggacttgcgcctggtcgaggcgcccatcagtgcctcggtactgtgtccgtacttcgttccgaccggtatcagccaaagtcatcgcaaccgccccgatgacgtcgcgaacgccgctcgtccgacgatctcgcagctggcggcccaagccatgtccgataaggcggttagtagcggcaaggtaagcgcggctgcggtagcggagatgaccttcgcggcgatcggcagcgaccagttctacgtctacagccacccgcaggctctggggcatgtgcaaaagcggatggaggagatcatcacccagaccaaccccggcgacccgtacgctggcgccgagcacgtgcgcgagatgttgcaagccaaactgaaggcgggcgcc

SEQ ID NO: 929 - protein, 295 aa, Artificial Sequence
  Description of Artificial Sequence: Synthetic polypeptide
MKSFENKVAAITGAGSGIGRALAVELGRQGCHLALADVNAAALEETRQLLASSGVRVSTAVVDVADREQVQAWADKAASEHGRVNLIFNNAGVAHAGTVEGSDYSEYEWIMNINFWGVVNGTKAFLPHLKASGNGHVVNVSSVFGLFAQPGMSAYNATKYAVRGFTESLRQELDMEDSGVSASCVHPGGIKTNIAKTARMNESMAKVTGQAADKARQQFNDQLLRTTPEKAAQVILRGVQRDSRRILIGADAHAIDVMLRLAPVLYQRVVTASMRLAARFAPRPKSPQGAREASE

SEQ ID NO: 930 - DNA, 885 bp, Artificial Sequence
  Description of Artificial Sequence: Synthetic polynucleotide
atgaagagcttcgaaaacaaggtcgccgccatcacgggcgcgggtagcggaatcggtcgcgccctggcggtagaactcggccgccagggctgtcatctcgcactggccgatgtgaacgccgccgcactcgaagaaacccgccaactcctggccagcagcggtgtccgcgtgagtaccgccgtcgtggatgtcgccgatcgtgagcaggtacaggcctgggccgacaaggcggcaagcgagcacggtcgcgtgaacctcatcttcaataacgcgggggtggcccacgcggggaccgtagaggggtccgactacagtgagtacgagtggatcatgaacatcaacttctggggcgttgtgaacggcaccaaggcattcctcccacacctcaaggcctccggcaacggccatgtcgtgaatgttagcagcgtctttggcctgttcgcgcagcccggtatgtcggcctacaacgccacgaaatatgccgtgcgcggattcaccgagtccctgcgccaagaattggacatggaagacagcggcgtcagtgcctcgtgcgtccaccccggcgggatcaagaccaatatcgcgaaaacggcgcgcatgaacgaaagcatggccaaggtgaccggccaggccgctgacaaggcccgtcagcagttcaatgaccagctgctccgcacgaccccagaaaaagcggcccaagtgatcctccgcggtgtgcagcgcgactcccggcgcattctgatcggggcggatgcgcacgccatcgatgtgatgctgcggctggcgccggtgctgtaccagcgcgtagtgaccgcctcgatgcgcctcgccgcgcgttttgctccgcggccgaagagcccgcagggcgcccgcgaagcctccgag

SEQ ID NO: 931 - protein, 300 aa, Artificial Sequence
  Description of Artificial Sequence: Synthetic polypeptide
MKQFAGGVAVITGGASGFGKEFAKLGAGLGMKLVLADIQQDALDAAVAGFKAQGVEAIGVRVDVSRVEDVQALADAAIRAFGKVNLLFNNAGVGAGGLIWENTQKDWDWVLGVNLHGVIHGVRIFTPLMLAEAAKDPAYEGHIVNTASMAGLLNAPAMGIYNVSKHAVVALTESLYQDLSLVTGQIHCSVLCPYFVPTGITQSHRNRPQDLANAAPPTRSQLVAQAMTDKAVSSGKVTAEQVGQMTFDAIRHEHFYIYSHPHALGPVQHRFEDIVSQRNPSDPFEGKPDVRARLVEALRG

SEQ ID NO: 932 - DNA, 900 bp, Artificial Sequence
  Description of Artificial Sequence: Synthetic polynucleotide
atgaagcaatttgccggcggcgtcgcggtcatcacgggaggcgccagcggcttcggaaaggaatttgcgaagttgggcgcgggcctgggcatgaagctggtgctggccgatatccagcaggacgctctggacgcggctgtggccggtttcaaggcgcagggcgtcgaagctattggggtgcgtgtggatgtcagccgcgtcgaggacgtgcaggcactggctgacgccgctatccgtgcattcggcaaggtcaacctgctcttcaacaacgcgggtgtaggagccggtggcttgatctgggaaaacacccagaaggactgggactgggtcctgggcgtcaacctgcacggcgtgatccacggggtccgcatcttcaccccgctcatgctcgccgaagccgccaaagaccccgcgtacgaagggcatatcgtgaataccgcctcgatggcgggcctgctcaacgccccggccatggggatttacaatgtgagcaaacacgcggtcgtcgccctcaccgagagcctctaccaggacctgagcctcgtcaccgggcagattcattgttcggttctgtgcccgtatttcgtcccgaccgggatcacccagtcgcaccgcaaccggcctcaggacctggcgaacgccgcgccaccaactcgcagccagctggtagcgcaagcgatgaccgacaaggcggtgagcagcggtaaggtcaccgccgagcaagtcggccagatgaccttcgacgcgatccgccacgagcacttctacatctactcccacccgcacgccctgggcccggtccaacatcggttcgaggacattgtcagtcagcgcaacccgagcgatcccttcgaaggcaagcccgacgtccgggcccgcctggtagaagcgctgcgtggt

SEQ ID NO: 933 - protein, 294 aa, Artificial Sequence
  Description of Artificial Sequence: Synthetic polypeptide
MKDFRDKVVAITGAGSGIGRALALNFAEKGARLALSDVNFASVAETVCLAEKLGAQAKAYTLDVADRDAVIAHAAEVRADFGKVNVIVNNAGVAMGGSVEAMDWKDIDWILNINFHGVINGTKAFLPHLIESGEGQIVNISSVAGFVGAAFGSGYCTSKFGVRGFTECLRQELIAENKPVRATVVHPGGVRTNIAANPKATDDPDTARKWFHRVAATSPEGAARIIVRGIRWNSPRILVGPDAYLIDLFPRILGGRYQDILAWGTRFGLWFLTKSRFNTKRFGFDPEKFGIKMS

SEQ ID NO: 934 - DNA, 882 bp, Artificial Sequence
  Description of Artificial Sequence: Synthetic polynucleotide
atgaaggatttccgcgacaaggtggtcgctatcaccggggcaggctcgggaatcggccgtgccctggcactcaatttcgccgaaaaaggagcccgcctggccctctccgacgtgaacttcgcatcggtcgcagagaccgtttgcctggccgaaaagctcggcgcacaggcgaaggcctacacgttggacgtggccgatcgggacgccgtaatcgcccatgccgccgaagtccgggccgatttcggcaaagtcaacgtgatcgtgaacaatgcgggcgtcgccatgggtggcagcgtggaggccatggattggaaggacatcgactggatcttgaatatcaacttccacggcgtaattaacggcacgaaagccttcctgccgcacctgatcgagtccggcgagggccaaatcgttaatatctccagcgtcgcggggttcgttggggccgcgtttggcagtggctactgcaccagcaagttcggcgtgcgcgggttcacggaatgtctgcggcaggaattgatcgccgaaaacaagccggtccgtgcgactgtcgtccatcctggcggcgtccgtaccaatatcgccgcgaacccgaaggcgactgatgacccggatacggcccgcaagtggttccatcgggtcgccgctaccagccctgagggcgccgcgcggatcatcgtccgtggtatccggtggaacagccctcggattctcgtgggtcctgacgcgtacctgatcgatctcttcccccgtatcctcggcgggcggtaccaagacattctggcctggggcactcgcttcggcctctggttcctgacgaagtcccggttcaacaccaagcgcttcggcttcgacccggaaaagttcggcatcaagatgtcc

SEQ ID NO: 935 - protein, 300 aa, Artificial Sequence
  Description of Artificial Sequence: Synthetic polypeptide
MKQFAGGVAVITGGASGFGKEFAKIGAGLGMKLVLADIQQDALDAAVAEFSAQGVEVIGLRVDVSKVEDVQALADAAIKTFGKVNLLFNNAGVGAGGLVWENSERDWDWVLGVNLHGVIHGVRIFTPLMLEAAKKDPSYEGHIVNTASMAGLLNAPAMGIYNVSKHAVVALSESLYQDLSLVTEQIHCSVLCPYFVPTGITQSDRNRPQDLANTAPPTKSQLVSRAMSEKAVSSGKVTAEQVGQMTFDAIRNAGFYIYSHPHALAPVQHRFEDIVSQRNPSDPFEGKPDVRARLVDALRG

SEQ ID NO: 936 - DNA, 900 bp, Artificial Sequence
  Description of Artificial Sequence: Synthetic polynucleotide
atgaagcagtttgccggtggcgtggcggtcatcaccggcggcgcgagcggcttcggaaaggagttcgccaagatcggtgccggtttgggcatgaagctggtgctggcggacatccagcaggacgccttggatgccgcggtggctgaatttagcgcccagggtgtcgaggtaatcggactgcgcgtcgatgtctccaaggtggaagacgtgcaggccctggccgacgctgcgatcaagaccttcggcaaggtcaacctgctgttcaacaacgccggtgtaggcgccggaggcttggtctgggagaacagcgagcgggactgggactgggtactcggcgtgaacctgcatggcgtgatccatggcgtgcgcatcttcaccccgctgatgctcgaagccgccaagaaggacccgagctacgaaggacacatcgtcaacaccgcctccatggcgggcctgttgaacgccccggccatgggcatctacaatgttagcaagcatgccgtggtggcgctcagcgaaagcctctaccaggacctgagcctggtgaccgagcagatccattgttccgtgctgtgcccgtacttcgtgccgaccggcattacccagagtgatcggaaccgcccccaggacctggctaacaccgctcccccaaccaagtcgcagctggtcagccgggccatgtcggagaaggccgtaagctcgggcaaggtcaccgcggaacaggtcggtcaaatgaccttcgacgccatccgtaacgccggcttctacatctatagccatccgcacgccctcgcgccagtgcagcatcggtttgaggacatcgtctcgcagcgcaaccctagcgacccgttcgagggcaagccggacgtccgcgcccgtctggtcgacgcgctccgcgga

SEQ ID NO: 937 - protein, 300 aa, Artificial Sequence
  Description of Artificial Sequence: Synthetic polypeptide
MKDFSNKVAVITGGASGFGKEFAHIAADIGMKLVLADVQEDALDATVAEFKARNVPVIGLRTDVSRADQVQALADAAIEAFGQVNLLFNNAGVGAGGLIWENSEKDWEWVLGVNLYGVVHGVRIFTPLMLAAAGKDPAYQGHIVNTASMAGLLNPPAMGVYNVSKHAVVALTETLYQDLGLVTEQVRCSVLCPYFVPTGINQSQRNRPADLANQAPPTRSQLVSQALSDKAVGSGKVTAAEVAQLTFDAIRDESFYIYSHPQALAPVRQRFEDIVGQRNPGDPFADKPEVRAGLVAALRG

SEQ ID NO: 938 - DNA, 900 bp, Artificial Sequence
  Description of Artificial Sequence: Synthetic polynucleotide
atgaaggatttctccaacaaggtcgcagtgatcaccggcggcgccagtggcttcggaaaggagttcgcgcacatcgccgctgacatcggtatgaagctggtgctggccgacgtccaagaagacgccctggacgccaccgtcgccgagttcaaggcccgtaacgtaccggtgatcggcctgcggaccgacgtgagtcgggcggaccaagtccaagccctggccgatgcggccatcgaagcgttcggccaggtcaacctgctgttcaataacgcgggcgtgggtgcgggtggcctgatttgggaaaacagcgagaaggactgggagtgggttctgggcgtgaacctctatggcgtcgtgcacggcgttcgtatcttcaccccgttgatgctggctgctgcgggcaaggacccggcgtaccagggccatatcgtaaacactgccagcatggcgggtctgctgaaccctccggccatgggcgtctacaacgttagtaagcacgccgtggtcgccctgaccgaaaccctctaccaggacctgggcctcgtcacggaacaggtccggtgtagcgtgttgtgcccctacttcgtccccaccggcatcaaccagtcgcaacgcaatcgcccagccgacctggccaaccaagcccctccgactcgctcccaactggtcagccaggccctcagtgacaaggcagttggctccgggaaagtaaccgccgcggaggtggcgcagctgaccttcgacgccatccgtgacgagagcttctacatctacagccacccgcaggccctggcacccgtgcggcagcgtttcgaagacatcgtgggccagcgcaaccccggagacccgttcgcggacaagcctgaagtccgcgcgggcctggtggcggcgctgcgcggc

SEQ ID NO: 939 - protein, 300 aa, Artificial Sequence
  Description of Artificial Sequence: Synthetic polypeptide
MKQFAGGVAVITGGASGFGKEFAKLGAGLGMKLVLADIQQDALDAAVAGFKAQGVEAIGVRVDVSRVEDVQALADAAIRAFGKVNLLFNNAGVGAGGLIWENTQKDWDWVLGVNLHGVIHGVRIFTPLMLAEAVKDPAYEGHIVNTASMAGLLNAPAMGIYNVSKHAVVALTESLYQDLSLVTGQVHCSVLCPYFVPTGITQSHRNRPQDLANAAPPTRSQLVAQAMTDKAVSSGKVTAEQVGQMTFDAIRHEHFYIYSHPHALGPVQHRFEDIVSQRNPSDPFEGKPDVRARLVEALRG

SEQ ID NO: 940 - DNA, 900 bp, Artificial Sequence
  Description of Artificial Sequence: Synthetic polynucleotide
atgaagcagttcgccggaggcgtcgcggtgattacgggcggcgccagtgggtttggaaaggagttcgcgaagctgggcgcgggcctggggatgaaactggtgctggctgacatccagcaggacgccctggatgctgcagtcgcgggattcaaagcccagggcgtagaggccatcggcgtacgcgtggacgtatcgcgggtggaggacgtccaggccctggctgacgccgccatccgggccttcgggaaagtcaacttgctgttcaacaacgcgggcgtcggtgccggtggcctgatctgggagaacacgcagaaggattgggattgggtcctcggcgtgaacctccacggcgtcatccatggcgtccgcatcttcactcctctgatgctcgcggaggctgtcaaggaccccgcgtacgagggccacatcgtgaacaccgcgtccatggccgggctgctgaacgcgcctgccatgggcatctacaatgtgagcaaacatgccgtggtcgcgctgaccgagagcctgtaccaggacctcagcctggtgacgggacaggtgcactgcagcgtgctgtgtccgtacttcgtcccgaccggtatcacccagagccaccgcaaccgcccccaggatctggccaacgccgcccctccgactcgcagtcagctggtggcacaggcaatgactgataaggccgtgtccagcggtaaggtcactgcggagcaggtggggcagatgaccttcgacgcgatccgccacgaacatttctacatctacagccatcctcacgcgctcggcccggtccagcaccgtttcgaagacatcgttagccagcggaaccccagcgatccgttcgaggggaagccggacgtccgcgctcgtctcgtcgaggcgctccgcggc

SEQ ID NO: 941 - protein, 300 aa, Artificial Sequence
  Description of Artificial Sequence: Synthetic polypeptide
MKQFAGGVAVITGGASGFGKAFARLGAGLGMKLVLADIQQDALDAAVAGFRAQGVEVIGVRVDVSREADVQALADAAIRTFGKVNLLFNNAGVGAGGLIWENSQQDWDWVLGVNLHGVIHGVRIFTPLMLAEAAKDPSYAGHIVNTASMAGLLNAPAMGIYNVSKHAVVALTESLYQDLSLVTEQIRCSVLCPYFVPTGITQSHRNRPQDLANAAPPTRSQLVAQAMTDKAVSAGKVSAEQVGQMTFDAIRDERFYIYSHPHALAPVQHRFEDIVSQRNPSDPFEGKPDVRARLVESLRG

SEQ ID NO: 942 - DNA, 900 bp, Artificial Sequence
  Description of Artificial Sequence: Synthetic polynucleotide
atgaagcagttcgccggcggtgtggcggtgatcactggcggcgcgagtggcttcggaaaggccttcgcgcgcttgggcgcgggcctgggaatgaaactcgtcctcgcagatatccaacaggacgcgctcgatgccgcggttgctggctttcgggcccagggagtcgaagtgatcggcgtacgggtcgacgtgtcccgcgaggccgatgtccaggccctggctgatgccgcaatccgcaccttcggcaaggtcaacctgctgttcaataacgctggcgtaggagccggcggcctgatttgggagaatagccagcaggattgggactgggtcctgggcgtgaacctgcatggggtcatccacggcgtccgcatcttcactcctctcatgctggcagaggctgccaaggacccgagctatgccggccacatcgtcaacaccgcctccatggccggcctgctgaacgcaccggccatggggatctacaacgtgtccaaacatgcggtcgtggctctgaccgagtcgctgtaccaagacctgagtctggtaactgagcagatccgctgttcggtgctctgcccctactttgtccctaccggcattacccagagccatcggaaccgccctcaagacctggcgaacgctgccccgccaacccgctcgcagttggtcgcccaggcgatgacggataaggccgtgagcgctggcaaggtgtccgccgaacaggtgggccagatgaccttcgacgccatccgcgacgaacgcttctatatctactcccatccccacgcgctggcccccgtacagcatcggtttgaggacatcgtgagtcagcgcaacccatcggacccattcgaaggcaagccggacgtccgtgcacgcctggtggagtccttgcgcggg

SEQ ID NO: 943 - protein, 300 aa, Artificial Sequence
  Description of Artificial Sequence: Synthetic polypeptide
MKQFAGGVAVITGGASGFGKEFAKIGAGLGMKLVLADIQQDALDAAVAEFSAQGVEVIGLRVDVSKVEDVQALADAAIKTFGKVNLLFNNAGVGAGGLVWENSERDWDWVLGVNLHGVIYGVRIFTPLMLEAAKKDPSYEGHIVNTASMAGLLNAPAMGIYNVSKHAVVALSESLYQDLSLVTEQIHCSVLCPYFVPTGITQSDRNRPQDLANTTPPTKSQLVSRAMSEKAVSSGKVTAEQVGQMTFDAIRNAGFYIYSHPHALAPVQHRFEDIISQRNPSDPFEGKPDVRARLVDALRG

SEQ ID NO: 944 - DNA, 900 bp, Artificial Sequence
  Description of Artificial Sequence: Synthetic polynucleotide
atgaaacagttcgcgggcggagtagccgtaatcaccggcggcgcgtccggctttgggaaggagtttgccaagatcggtgcaggcttggggatgaagctggtcctggccgacattcagcaggatgccctggatgcggcggtcgcggagttctccgctcagggagtagaagtaatcggcctccgggtggacgtcagcaaggtcgaagacgtccaggccctggcggacgccgccatcaagaccttcgggaaggtcaacctgctgttcaacaacgcgggcgtcggcgccggaggcctggtgtgggagaacagcgaacgcgattgggattgggtcctgggcgtgaatctgcacggcgtgatctacggggtccgtatctttacgccgctgatgctggaagccgccaagaaggacccatcgtacgagggacatatcgtgaacaccgcctccatggcgggcctgctgaacgcgccggccatgggtatttacaatgtgagcaagcacgccgtcgtcgcactctccgaaagcctgtaccaagacttgagcctggtcaccgagcagattcactgctcggtgctgtgcccgtacttcgtgcctaccggtatcactcaatccgaccgcaaccgcccgcaggacttggctaacaccacgccgccgacgaagtcccaactcgtgtcccgtgcgatgtccgagaaggcggttagctcgggcaaggtcactgccgaacaggtgggccagatgaccttcgacgccatccgcaacgcgggcttctacatctactcccatcctcatgcgctcgccccggtgcagcaccgcttcgaagacatcatctcccagcgcaacccgagcgaccctttcgaagggaaaccggacgtacgggcccgcctggtcgacgccctgcgcggc

SEQ ID NO: 945 - protein, 300 aa, Artificial Sequence
  Description of Artificial Sequence: Synthetic polypeptide
MKQFAGGVAVITGGASGFGKTFAKLGAGLGMKLVLADIQQDALDAAVAGFQAQGVEVIGVRVDVSREADVQALADAAIRAFGKVNLLFNNAGVGAGGLIWENTQKDWDWVLGVNLHGVIHGVRIFTPLMLAEAARDPSYEGHIVNTASMAGLLNAPAMGIYNVSKHAVVALTESLYQDLSLVTEQIHCSVLCPYFVPTGITQSHRNRPQDLANTAPPTKSQLVAQAMNDKAVSSGKVTAEQVGQMTFDAIRGERFYIYSHPHALAPVQHRFEDIVSQRNPSDPFEGKPDVRARLVESLRG

SEQ ID NO: 946 - DNA, 900 bp, Artificial Sequence
  Description of Artificial Sequence: Synthetic polynucleotide
atgaaacagttcgccggtggagtggccgtcatcactggcggcgcgtccggcttcggaaagacgttcgccaagttgggggccggtctgggcatgaagctcgtgctggccgacatccaacaggacgccttggacgccgccgtcgcgggctttcaggcgcagggcgtcgaagtcatcggcgtacgggtcgatgtgtcgcgcgaagccgacgtccaggccctcgccgatgcggccatccgcgcgttcggtaaggtcaacctcctgttcaacaatgcgggcgtcggcgcgggcggtctgatttgggagaacacgcagaaggactgggactgggtactgggcgtcaacctccacggcgtaatccacggcgtgcggatcttcacgccgctgatgctggccgaagccgcgcgtgatccgtcctacgagggccacatcgtcaataccgccagtatggcaggcctgctgaacgcgccagcgatgggaatctacaacgtctccaagcacgcggtcgtagccctgaccgaatcgctgtaccaggacctcagcctggtgactgagcagatccactgcagcgtcctgtgcccctacttcgtccccacggggatcacccaatcgcaccggaaccggccgcaggacctcgcgaacaccgccccaccgaccaagagccagctggttgcccaggccatgaacgacaaggcggtgtcgtcgggcaaggtcaccgccgaacaggtgggccaaatgaccttcgacgcgatccgcggcgagcgcttctacatttatagccatccccacgccctggcccctgtccagcatcgcttcgaggacatcgtgagccagcgcaacccaagtgacccgttcgagggcaaaccggacgtgcgtgcccgcctcgtggaaagcctgcgtggc

SEQ ID NO: 947 - protein, 282 aa, Artificial Sequence
  Description of Artificial Sequence: Synthetic polypeptide
MAEEAARRGMKVVIADVEAGAMEQVVNDLRATGTEAIGVLTDVTNAESVEALAVATEQSFGPPNLLFNNAGVASGGPIWESTEKDWKWLFGVNVDGVANGVRSFTPRMIAAAAADPGYEGCIVNTASMAGLVTAPGMGIYSVSKHAVLALSECLYHDLDLIGPQVRAAVLCPFYVSTNISQCHRNRPADLANDSGPTRSQLATQAISAKDLANGTLTPEEVVAITFKAIEEDRFYIYPSPEQLPIVKSRLDHLASGTNPDIPYEDIPMFKARRDSLKAALAG

SEQ ID NO: 948 - DNA, 846 bp, Artificial Sequence
  Description of Artificial Sequence: Synthetic polynucleotide
atggcagaggaagcggcgcggcgggggatgaaggtcgtgatcgccgatgtcgaggcgggcgcaatggagcaggtggtcaacgatttgcgggccaccggaaccgaggccatcggcgtcctgaccgatgtcaccaacgccgaaagcgtggaggccctggcggtggcgacggagcaatcgttcggaccgcccaatttgctgttcaacaacgcgggcgtcgcgagtggcgggccgatctgggaaagcaccgagaaggactggaaatggctcttcggggtaaatgtcgacggtgtcgccaatggcgtgcgcagcttcaccccacggatgattgccgccgctgcggccgaccccggctatgaaggctgcatcgtcaacaccgcctccatggcaggcctggtgaccgcaccgggcatggggatttacagcgtgtcgaaacatgcggtcctggcgctctccgaatgcctgtaccatgacctggacctgatcggtccacaagtgcgcgcggccgtcctgtgccccttctacgtgtccaccaacatcagccaatgccatcgcaaccgtccagccgatttggcgaacgactcgggaccgacccgcagccagctcgctacgcaggcgatcagcgcgaaggacctggccaacggcacgctcaccccggaggaggttgtcgccatcacctttaaggccatcgaagaggaccgcttctacatctatccctcgccggaacagctccccatcgtgaagtcccgcctcgaccatctggcgagcggcaccaaccctgacatcccgtacgaggacatcccgatgttcaaagcccggcgcgacagcctgaaggcggcgctcgctggc

SEQ ID NO: 949 - protein, 301 aa, Artificial Sequence
  Description of Artificial Sequence: Synthetic polypeptide
MIKNFKGKTAVLTGAGSGFGLECARIGAKLGMNLVLVDVQQEALDRAAAEFEGQGVRVLARRVDVSDAAQMQALADEVRQQFGAPHFVFNNAGVGAGGLVWENTLEDWQWVLGVNLWGVIHGVRLFTPMMLEAAKADPSFEGHIVNTASMAGLLAPPNMGIYNVSKHAVVSLTETLYQDLALVSDQISASVLCPFFVPTGISHSERNRPSHLAAQPLTASQKIGQAMSEKAVGSGKVTATDVAQKVFDAIAANQFYIYSHPQALGSVQTRMEDVVQGRNPTDPFAHKPELGASLKASLRAA

SEQ ID NO: 950 - DNA, 903 bp, Artificial Sequence
  Description of Artificial Sequence: Synthetic polynucleotide
atgattaagaactttaaaggcaagaccgccgtcctgacgggtgccggcagcggattcggcctggagtgcgcccggatcggcgccaagctggggatgaacctggtgctggtcgacgtccaacaggaggccctcgaccgcgcagccgccgagttcgaaggccaaggcgttcgggtgctcgcccgtcgggtggacgttagtgatgctgcccagatgcaggccttggcggacgaagtgcggcagcagttcggcgccccgcatttcgtgtttaacaacgcgggcgtaggcgcaggaggcctggtctgggaaaacaccctggaagactggcagtgggtgctgggcgtaaacctgtggggcgtaatccatggggtgcgtctgttcaccccaatgatgctggaggcggcaaaggccgacccgtcgttcgaaggccatatcgtcaacaccgcttccatggcaggcctgctggcgccgccgaacatggggatctacaacgtgtcgaagcatgcggtcgtcagtctcaccgagacgctgtatcaggacctggcgctggtgagcgaccagatctcggccagcgtgctgtgtccgttcttcgtgccgacgggcatcagccattccgaacggaaccggccaagccacctcgcggcccagccgctgaccgccagccaaaagatcggacaggccatgtccgagaaggcggtaggcagcgggaaggtaaccgcgaccgacgttgcccagaaggtgttcgacgcgatcgccgccaaccagttctacatctactcgcacccgcaggccctcggctccgtgcagactcggatggaagacgtcgtgcagggccgcaatccgaccgatccattcgctcacaagcctgaactgggcgccagcctgaaggcctccctgcgtgcagcc

SEQ ID NO: 951 - protein, 301 aa, Artificial Sequence
  Description of Artificial Sequence: Synthetic polypeptide
MIKNFKGKTAVLTGAGSGFGLECARIGAKLGMNLVLVDVQQEALDRAAAEFEGQGVRVLARRVDVSDAAQMQALADEVRQQFGAPHFVFNNAGVGAGGLVWENTLEDWQWVLGVNLWGVIHGVRLFTPMMLEAAKADPSFEGHIVNTASMAGLLAPPNMGIYNVSKHAVVSLTETLYQDLALVSDQISASVLCPFFVPTGISHSERNRPSHLAAQPLTASQKIGQAMSEKAVGSGKVTAPDVAQKVFDAIAANQFYIYSHPQALGSVQTRMEDVVQGRNPTDPFAHKPELGASLKASLRAA

SEQ ID NO: 952 - DNA, 903 bp, Artificial Sequence
  Description of Artificial Sequence: Synthetic polynucleotide
atgatcaaaaacttcaaaggcaagaccgcagtcctgaccggtgcaggcagcggatttggtctggagtgcgcccgcatcggcgcgaaactgggcatgaacctcgtcctcgtcgacgtacagcaggaggccctggaccgcgcggcggccgagttcgaggggcagggtgtccgtgttctggcccggcgcgtggatgtgtccgacgccgcccaaatgcaggctctggcagacgaggtgcgccaacaattcggcgccccgcatttcgtgttcaacaacgcgggcgtgggtgccggcggcctcgtctgggaaaacacgttggaggactggcagtgggtcctcggagtcaacctgtggggagtgatccacggtgtgcggctgtttaccccgatgatgttggaggccgctaaagccgacccctccttcgagggccacatcgtgaacaccgcctcgatggccggcctgctcgcgccgccgaacatgggcatctacaacgtcagcaagcacgccgtcgtctcgctgacggaaaccctgtaccaggacctcgcgctggtctccgaccaaatctcggcgagcgtcctgtgcccgttcttcgtcccaaccggcatttcccacagcgaacgcaaccggccgagccatttggcggcccagccgttgacggcctcgcagaagatcggccaggccatgtcggagaaggccgtgggcagcggcaaggtgaccgcccccgacgtagctcagaaggtcttcgatgcgatcgcggccaatcagttctacatctatagccacccgcaggcgctgggctccgtgcagactcgcatggaggacgtggtacagggccgcaaccccaccgatccgttcgctcacaagccggaactcggcgccagcctgaaggcctcgctccgcgccgca

SEQ ID NO: 953 - protein, 295 aa, Artificial Sequence
  Description of Artificial Sequence: Synthetic polypeptide
MKSFENKVAAITGAGSGIGRALAYHLARQGCHLALSDVNVEGLQETVEQARKLGVTVSGQRVDVADRAAVEAWAEQVVSEFGRVNAIFNNAGVAQGGTVEGNDHTDYEWIMNINFWGVVNGTKAFLPYLKAAGQGHVINVSSVFGLFSQPGMSAYNASKFAVRGFTESLRQELDMADCGVSASCVHPGGIKTNIAKTARMNDSLAKVTGQEAEQARQQFNDQLLRTTPEQAAKVIVNGVLANKRRILIGADAHALDWMQRSMPALYQRLVTVSMRLAARFAPKPRSVNKVSEATE

SEQ ID NO: 954 - DNA, 885 bp, Artificial Sequence
  Description of Artificial Sequence: Synthetic polynucleotide
atgaagtcgttcgaaaacaaagtcgccgcgatcaccggagcaggcagcggcatcggtcgcgccctggcgtaccatctcgcccgtcaggggtgccatctggcgctgagcgacgtcaatgtggaaggtctgcaggagaccgtcgagcaggcccgtaaactgggagtgaccgtgtcggggcaacgtgtcgatgtagccgaccgggccgctgtggaagcctgggcggaacaggtcgtcagcgagttcggacgcgtaaacgcaatctttaacaatgcgggggtagcccagggcggcaccgtcgaaggcaacgaccacacggactacgagtggatcatgaacatcaacttctggggagtcgtgaacggcactaaggccttcctcccttatctgaaggcggccggtcagggccatgtgatcaacgtctcctccgtgttcggcttgttctcgcagcccggcatgtccgcctataacgcgtcgaagttcgcggtacgtggattcaccgagagcctgcggcaggagttggacatggccgattgtggcgtctccgcctcctgcgtccaccccggcggcatcaagaccaatatcgcgaagaccgcccggatgaacgacagcctcgctaaggtgactggccaggaagcggagcaggcccgccaacaatttaacgaccagctgctgcgcacgacgcctgaacaagcggctaaggtcattgtcaacggcgtcctcgccaataaacgccgcatcctgatcggcgccgacgcgcacgcgctggactggatgcagcggagcatgccggccttgtatcagcgcctggtcacggtctccatgcgtttggcggcccgcttcgccccaaagccccgcagtgtgaacaaggtcagtgaggccaccgaa

SEQ ID NO: 955 - protein, 273 aa, Artificial Sequence
  Description of Artificial Sequence: Synthetic polypeptide
MTMKKLKNKVAVVTGAGSGIGRALAKSLADRGCRLALSDVNESGLAETAAALSGADVKTYRLDVSDRDAIFAHAEEVAKDFGQVNLVINNAGVALSATVREMTDEDFKWVMDIDFWGVAHGTRAFLPHLIASGDGHVVNVSSVFGLIGVPKQSAYNAAKFAVRGFTEALRQEMKLENQPVAVSCVHPGGIRTNIANAARMGKSENAVAQRKGFDKLAMTTPEKAAETIVKGILKNESRILVGPDAWGIDAINRLLGSAYQPLVERFSRKNLYI

SEQ ID NO: 956 - DNA, 819 bp, Artificial Sequence
  Description of Artificial Sequence: Synthetic polynucleotide
atgaccatgaaaaagctcaagaacaaggtggcggtggtgacgggtgcgggcagcggaatcggccgggccctggcgaaatcgctggccgaccgtggctgtcgtttggcactgagtgacgtgaacgagagcggcctcgccgaaaccgctgccgccctgagcggcgccgatgttaagacctatcgcctggacgtgtcggatcgggacgcaatcttcgctcacgccgaggaggtagcgaaggatttcggacaggtcaacctggtgatcaacaacgcgggcgtggcactgtccgcgaccgtgcgggaaatgaccgacgaggacttcaagtgggtcatggacatcgacttctggggcgtggcccacggcacccgcgctttcctgcctcacctgattgcttccggcgatggccatgtggtgaacgttagctcggtcttcggcttgatcggggtacccaaacagtccgcgtataacgccgctaagttcgccgtgcggggcttcaccgaggcgctccgccaagagatgaagctggagaaccaaccggttgcggtgtcctgtgtgcaccccggcggcatccgcactaacatcgctaatgcggcccgcatggggaagagcgagaacgctgtggcgcagcgcaagggcttcgacaagctcgccatgacgacccccgaaaaggccgccgagaccatcgtgaagggcatcctgaagaacgagagtcgcatcctggttggcccggacgcgtggggtatcgacgcgattaatcggctgctcggctcggcctatcagcctctggttgaacggttcagccgcaagaacctgtatatc

SEQ ID NO: 957 - protein, 281 aa, Artificial Sequence
  Description of Artificial Sequence: Synthetic polypeptide
MKNFKDKVAVITGAGSGIGRALAMNLAASGAKLALSDINEAGLKETANSLNLSEDRLMTKILDVADRQAFYAFADDVVNHFGHANMIFNNAGVALGATVEEMDYDDFEWLMNINFWGVVYGTKAFLPYLKQAGEGHIINISSIFGLVGIPTQSAYNAAKFAVRGFTESLRIELELEGSPVSCTSIHPGGIKTNIAKAARMSDGVERITGASKEQAIQDFEKMFRTTPEEAASTILKGVRGNKRRVLIGSDAIAVDTMQRLLPTSYQRLIAMGQKYMNKSKG

SEQ ID NO: 958 - DNA, 843 bp, Artificial Sequence
  Description of Artificial Sequence: Synthetic polynucleotide
atgaagaatttcaaggacaaggtggcggtgatcactggcgcaggcagcggtatcggtcgcgctctggccatgaacctcgccgccagcggcgcgaaactggccctgtcggacatcaacgaggcgggcctcaaagaaaccgccaactcgctcaacctgagcgaggaccgcctgatgacgaagatcctggacgtagccgaccgtcaggcgttctacgcattcgccgatgacgtagtcaaccatttcggccatgccaacatgatcttcaacaacgccggggtagcactgggcgcgaccgtcgaagagatggactacgacgacttcgagtggctgatgaacatcaacttctggggcgtggtgtacggcaccaaggccttcctcccttatctgaaacaagcgggcgagggccatatcatcaacatctccagcattttcgggctggtcggaatccccactcagagcgcgtataatgccgccaaattcgcggtgcgtggtttcaccgaaagcctgcggatcgaattggaactggagggcagcccagtgtcgtgtaccagcatccacccagggggcatcaagaccaatatcgccaaggctgctcgcatgagcgatggggtcgaacggattactggtgcgagtaaggagcaggctatccaggacttcgagaagatgttccgcacgaccccggaggaagctgccagtaccatcctgaaaggggttcggggcaacaagcggcgcgtcctcatcggctccgatgccatcgctgtcgacaccatgcagcggctcctgccgacttcctatcagcggctgattgctatgggccagaaatacatgaataagagcaagggc

SEQ ID NO: 959 - protein, 296 aa, Artificial Sequence
  Description of Artificial Sequence: Synthetic polypeptide
MKDFHNKVAAITGAGSGMGRCLAIQLAQSGCHVAISDCNEAGLAQTVAEVRRVAPMVQVTSHRVDVADRAAVHAWADDVARAHGRVNLIFNNAGVALSSTIEGMAYDDLEWIIGINFWGVVYGTKAFLPHLKASGEGHVVNTSSIFGLFAQPGMGAYNASKYAVRGFTESLRQELDLMDCGVSATTVHPGGIKTNIARASRVSSSVNGLLVRDAQQGREEFEKFFITTADKAARVILDGVRANKRRVLIGPDAYAADALSRVLPAAYQSLVVRDTRRKSKRLLSDTAGAPARGERA

SEQ ID NO: 960 - DNA, 888 bp, Artificial Sequence
  Description of Artificial Sequence: Synthetic polynucleotide
atgaaggacttccataacaaggtggcggccattactggcgcgggcagcggtatgggtcggtgtctggccatccaactcgcgcagtccggatgtcacgtcgcgatctccgactgtaatgaggccggcctggcacagaccgtggccgaggtccggcgggtcgccccgatggtgcaggttacgagccatcgggtggacgtagccgatcgtgccgccgtgcacgcctgggcggacgacgtggcgcgtgctcacggacgcgtgaacctgatcttcaacaacgcgggtgtagccctctcctccaccatcgagggcatggcgtacgatgacctggagtggatcatcggcatcaatttctggggtgtcgtctacgggaccaaggctttcctgccacacttgaaggcaagcggcgaaggccatgtggtcaacacctcgtcgattttcgggctgttcgcccaacccgggatgggggcctacaatgccagcaagtatgcggtccgcggcttcaccgaatcgctccgccaggaactggatttgatggattgcggcgtgtcggcgacgaccgtgcatccaggtgggatcaagaccaacatcgctcgcgcttcgcgcgtttccagctcggtcaacggcctcctcgtccgtgatgcccagcaaggccgcgaggagttcgagaagttcttcatcaccaccgcggacaaggccgcccgcgtgatcctggacggcgtacgggcgaataagcgccgcgtcctgatcggcccggatgcgtacgccgcggacgcgctcagtcgtgtgctgccggccgcctaccaatcgctggtcgtccgtgacacccgtcgcaagagcaagcgcctcctcagcgacaccgccggcgccccggcgcgcggagaacgggcg

SEQ ID NO: 961 - protein, 266 aa, Artificial Sequence
  Description of Artificial Sequence: Synthetic polypeptide
MKVAVITGAASGIGAGLAKKAVTLGMKVVVADRDQAGLEKVALELGDQALAVATDVTSQASLDTLADKAYAAFGQVDLLFNNAGVLSTGNSWEISDAKWQQAWQVNVNGIVNGLRAFVPRLLKANRPARIINTASVGGFLPSAMMAPYSATKFAVVALTEGLAGELAAIDPQIKVSLLAPGPVRTAIFREAPDAASAKFHGMMTHLLDENGMDTEEFANRVFAAIDRGEYWIVPQPEMLDPLLKARNKLIETRTDPVLSWTQETAE

SEQ ID NO: 962 - DNA, 798 bp, Artificial Sequence
  Description of Artificial Sequence: Synthetic polynucleotide
atgaaggtggcggtcatcaccggcgcagcctccggcattggtgccggtctggcgaaaaaggcggtgacgctgggcatgaaggtggtggtggcggatcgcgaccaggctgggctggaaaaagttgcgctggagctcggcgaccaggcgctcgctgtggccaccgatgtcaccagccaggccagtctcgataccttggccgacaaggcgtacgccgcgttcggccaagttgacctgctcttcaataacgcgggcgtcctctccaccggcaactcctgggagatctcggatgcaaagtggcagcaggcctggcaggttaacgtcaatggcatcgtgaacggcctgcgggcgttcgtcccccgtttgctcaaggcgaaccggccggcgcgcatcatcaacactgcctcggtgggcggttttctgccgtcggccatgatggctccttatagtgcgacgaagttcgccgttgtggccctcacggaaggcctggccggagagctggccgcaatcgatccccagatcaaagtctccttgctggcccctgggccggtacgcaccgcaatcttccgcgaagcccccgacgccgcgtccgcgaaattccacggaatgatgacccatctgctggacgagaacggcatggacaccgaggagttcgccaatcgcgtcttcgcagccatcgaccgcggggagtattggatcgtgccgcagccagaaatgctggacccgctgctgaaggcccgcaataagctgatcgaaacccgtaccgacccggtgctctcgtggacccaggaaacggcggaa

SEQ ID NO: 963 - protein, 305 aa, Artificial Sequence
  Description of Artificial Sequence: Synthetic polypeptide
MIPDFKGKVAVLTGAASGFGLECARIGAARGMKLVLVDVQQDALDRATAELQGAGAEVLARRVDVSDAEQMGTLAAAVQERFGAPHLVFNNAGVGAGGLVWENSVADWQWVLGVNLWGVIHGVRVFTPMMLEAAGRDPNWRGHIVNTASMAGLLTPPNMGVYNVSKHAVVALTETLYQDLALVSDQVGASVLCPYFVPTGISSSERNRPRDLAAGHVTRSQRIGQAMNDKAVNSGKVTAAQVAAAVFEAVASGAFYIYSHPQALGNVRERMEAIVGQHNPPDPFAARPDVGEKLRRELRQGTGLH

SEQ ID NO: 964 - DNA, 915 bp, Artificial Sequence
  Description of Artificial Sequence: Synthetic polynucleotide
atgatcccagacttcaagggcaaagttgccgtgctgaccggcgccgcgtcgggctttggcctggagtgcgctcgtatcggcgccgcccgcggcatgaagctggtcctggtggacgtccagcaagacgcgctggatcgcgccactgccgagctccagggtgcgggtgcggaagtcctcgcccggcgcgtggacgtcagcgacgccgagcaaatgggcaccctggccgctgcggttcaagaacgtttcggtgccccgcacctggtgttcaacaatgccggcgtgggtgccggcggcctggtgtgggagaactcggttgccgattggcagtgggtcctcggagtgaatttgtggggcgttatccacggtgtgcgggtcttcaccccaatgatgctggaagcagcaggccgcgacccgaactggcggggccacatcgtcaataccgccagcatggccggtctgctgactccgccgaacatgggcgtctataacgtgtcgaagcacgccgtcgtcgccctgacggagacgctctatcaagacctcgccctcgtgagtgatcaggtgggcgcctccgtactgtgcccatactttgtccccaccggcattagctcctccgagcggaatcgcccgcgggacctggcagcgggccacgtcactcggtcccagcgcattggccaggcgatgaacgacaaggccgtgaacagcggcaaggtaaccgccgcacaggtggctgcagccgtcttcgaagccgtagcttcgggcgcgttctacatctattcgcatccgcaggctctcggcaacgtgcgcgagcggatggaggccattgtcgggcagcataaccctccagaccccttcgcggcccgccccgacgtgggcgaaaagctgcgccgggaactgcgccagggcaccggactccac

SEQ ID NO: 965 - protein, 287 aa, Artificial Sequence
  Description of Artificial Sequence: Synthetic polypeptide
MKDFKGKVAVITGGANGIGFAIAEECAKREIKIVIADINELDLKKAEEKLKAQGAEVLALQTDVIKYEDMERLADKTLERFGHVDLLFNNAGVVVAGPAWSLSLRDWEWIMKVNVWGIIHGEKAFIPIMLKQDTECHIINTASAAGLLSLDGMSAYHTSKFAAVALSESTYLDLQCVTDKIKMSVFCPGFIQTDLNNCERHRPKDYDNDMEDEYYHSDSYKAKEEQKHKVIQNGIPVDMVGATIFEAIEEEKFYILTHPEINPLIGLRTRNILEGGNPSIKDIVGVK

SEQ ID NO: 966 - DNA, 861 bp, Artificial Sequence
  Description of Artificial Sequence: Synthetic polynucleotide
atgaaagactttaagggcaaggtggccgtaatcacgggaggggccaacggtattggcttcgctatcgccgaggaatgcgccaagcgggagatcaagatcgtgatcgcggacatcaacgaactcgatctgaagaaggccgaggagaagttgaaggcccagggagccgaggtcctggcgttgcaaaccgacgtcatcaagtatgaagacatggaacgcctggcggacaagacgctggaacgcttcggccatgtcgacctgctgttcaataacgcgggtgtggtagtcgccggtcctgcctggagcctgtccctccgtgactgggaatggatcatgaaagtcaacgtgtggggcatcatccacggggagaaggcgttcatccccatcatgctgaaacaggacaccgagtgtcacatcatcaacaccgcgagcgccgccggcctgctgagcttggacggaatgagcgcctaccatacgtccaaattcgccgcagttgcgctgagtgagtcgacttacctcgacctgcagtgcgtgaccgacaagatcaagatgagcgtattctgccctggcttcatccagaccgacctcaacaactgtgagcggcatcggccgaaggactacgacaacgatatggaggacgagtactaccacagcgacagctataaggccaaggaggagcagaagcataaggtgatccagaatggtatcccggtggacatggtgggagcgaccattttcgaagccatcgaggaggaaaaattctatatcctgacccatccggaaatcaacccgctgatcggcctgcgcacccgcaacatcctggagggcggcaacccgtccattaaggacatcgtaggcgtcaag

SEQ ID NO: 967 - protein, 266 aa, Artificial Sequence
  Description of Artificial Sequence: Synthetic polypeptide
MKVAVITGAASGIGAGLAKKAVTLGMKVVVADRDQVGLEKVALELGDQALAVATDVTSQASLDTLADKAYAAFGQVDLLFNNAGVLSTGNSWEISDAKWQQAWQVNVNGIVNGLRAFVPRLLKANRPARIINTASVGGFLPSAMMAPYSATKFAVVALTEGLAGELAAIDPQIKVSLLAPGPVRTAIFREAPDAASAKFHGMMTHLLDENGMDTEEFANRVFAAIDRGEYWIVPQPEMLDPLLKARNKLIETRADPVLSWTQETAE

SEQ ID NO: 968 - DNA, 798 bp, Artificial Sequence
  Description of Artificial Sequence: Synthetic polynucleotide
atgaaggtcgccgtgatcaccggagcggctagcggcatcggcgccggcctggctaagaaagcggtcaccctcgggatgaaggttgtcgtagcggaccgcgatcaggtgggcctcgaaaaagtggccttggagttgggcgaccaggccctcgccgtggccaccgatgtgacctcccaggcttcgctggataccctggccgacaaggcctacgccgccttcgggcaggtcgatctgctgtttaacaacgcgggggtgctctcgaccgggaactcgtgggaaatctccgacgccaagtggcagcaggcctggcaggtcaacgtcaacggcatcgtcaacggcctccgcgcattcgtcccgcgcctgctcaaggccaaccggccggcgcgtattatcaacaccgcgagtgtcgggggattcctgccgagcgccatgatggccccgtatagcgcgacgaagttcgcggtggtcgcgctgactgagggcctggccggtgaactggccgcgatcgacccgcagatcaaggtctccttgctggcgccgggcccagtccgtaccgcgatcttccgcgaagcccctgatgcggcgtcggccaagttccacggtatgatgacgcacctcctggacgaaaacggcatggacaccgaggagttcgctaaccgcgtgttcgccgcaattgaccgcggtgagtactggatcgtgcctcagccggagatgctggacccgctcctcaaggcccggaacaaactcattgagacccgcgccgacccggtactgagctggacgcaagagactgccgag

SEQ ID NO: 969 - protein, 300 aa, Artificial Sequence
  Description of Artificial Sequence: Synthetic polypeptide
MNQFEGRVAVITGGASGFGKEFARIGAGLDMKLVLADVQQDALDATVAELRGQGADVIGLRTDVSRGEQVQALADAAMERFGQVNLLFNNAGVGAGGLLWENSLKDWEWVLGVNLYGVVHGVRIFTPLMLAAAAKDPTYQAHIVNTASMAGMLSPPAMGVYNVSKHAVVTLTETLYQDLGLVTEQVRCSVLCPYFVPTGINQSQRNRPADLTNDAPPTRSQMVSQALTDKAVTSGKVTAEDVAQKTFDAIRAESFYIYSHPQALAPVQQRFEDIIGQRNPGDPFADKPEVRAGLVAALRG

SEQ ID NO: 970 - DNA, 900 bp, Artificial Sequence
  Description of Artificial Sequence: Synthetic polynucleotide
atgaatcagttcgaaggccgcgtggcagtcatcaccggcggtgcctccggctttggcaaggagttcgcccgcattggcgccgggctggacatgaagctcgtcctggcggacgtccagcaagacgccctggacgccaccgttgccgagctccgcggccaaggcgccgacgtgattggcctgcggacggacgtcagccgcggcgaacaggttcaggccctggcagacgccgccatggagcgtttcggacaggtgaacctgctgttcaacaacgccggtgttggcgccggcggcctcctctgggaaaacagcctgaaagactgggagtgggtgctgggggtcaacttgtacggcgtcgtccatggggtgcggatctttaccccgctgatgctcgccgccgccgcgaaggaccccacgtaccaagcgcatatcgtcaacaccgcgagcatggcgggaatgctgtcgccacccgccatgggtgtgtacaacgtgtcgaagcatgccgtggttacgctgaccgagaccctgtaccaggacctgggcctcgtgaccgagcaggtgcgttgctccgtgctgtgcccgtatttcgtacccaccggcatcaaccaatcccagcgcaaccgcccagcggatctcaccaacgacgccccgcccacccgcagccaaatggtaagccaagccctgaccgacaaggcagtgacgagcggcaaggtcacggccgaggacgtcgcgcagaagaccttcgacgctatccgggccgagtccttctacatctacagccatccccaggccctggccccggttcagcagcgtttcgaggacatcatcggacaacgtaacccgggcgaccctttcgccgacaaaccggaggtccgcgctggcctggtggccgcgttgcgcggc

SEQ ID NO: 971 - protein, 293 aa, Artificial Sequence
  Description of Artificial Sequence: Synthetic polypeptide
MAVITGGASGFGKEFARLGAGLGMKLVLADIQQDALDAAVAGFRAQGVEVIGVRVDVSREADVQALADAAIGAFGKVNLLFNNAGVGAGGLIWENSQQDWDWVLGVNLHGVIHGVRIFTPLMLAEAAKDPSYAGHIVNTASMAGLLNAPAMGIYNVSKHAVVALTESLYQDLSLVTEQIRCSVLCPYFVPTGITQSHRNRPQDLANAAPPTRSQLVAQAMTDKAVSSGKVTAEQVGQMTFDAIRDERFYIYSHPHALAPVQHRFEDIVSQRNPSDPFEDKPDVRARLVESLRG

SEQ ID NO: 972 - DNA, 879 bp, Artificial Sequence
  Description of Artificial Sequence: Synthetic polynucleotide
atggcggtcatcaccggcggcgctagtggtttcggcaaggagttcgcgcgcctgggtgccggcttgggcatgaaactcgtcttggcggacatccaacaggacgccctcgacgccgccgtcgccggttttcgcgctcagggcgtcgaagtcatcggagtccgcgtggacgtttcccgcgaagccgacgtccaagccttggcggatgccgcgattggggccttcggcaaggtcaacctgctgttcaacaacgcgggcgtgggggcgggcggcctcatctgggaaaactcgcaacaagactgggactgggtgctcggtgtaaacctccacggggtgatccacggcgtccgcatttttacccctctgatgctggccgaggccgccaaggaccctagctacgccggccatatcgtcaacacggcgtcgatggccggcctcctcaacgccccggcgatgggcatctacaatgtctccaagcatgcggtggtcgcgttgactgagtcgctgtaccaagacctgagcctggtcaccgagcagatccgttgcagcgtgctctgcccctacttcgtccccaccggaatcactcagagccatcggaaccgcccgcaggacctcgccaacgctgccccaccgacgcgctcgcaactcgtcgcccaggcgatgaccgataaggccgtcagcagtggcaaggtgacggcagaacaggttggtcagatgactttcgatgccatccgcgacgagcgcttctacatctacagccacccccacgcactggcgccggtccagcaccgcttcgaggacattgtgtcccaacgcaacccctccgaccctttcgaagacaagcccgacgttcgggcccggctcgtggaaagcctgcggggc

SEQ ID NO: 973 - protein, 301 aa, Artificial Sequence
  Description of Artificial Sequence: Synthetic polypeptide
MIQDFKGKTAVLTGAGSGFGLECARIGAARGMNLVLVDVQQDALDKAAAEMEAAGVQVLARKVDVSDAAQMEALAAAVKERFGAPHFVFNNAGVGAGGLVWENTVADWEWVLGVDLWGVIHGVRLFTPMMLEAAAKDPGYRGHITNTASMAGLLTPPNMGIYNAAKAAVVSLTETLYQDLTLVTDQIGASLLCPYFVPTGITSSERNRPNAPKDSELTKSQLIGQAMSNKAVSSGKITAAEVAAKVFDAISDNQFYVFSHPKALGNVRARMENIVSVVNPADPFLERPEIGQKLREQLRAA

SEQ ID NO: 974 - DNA, 903 bp, Artificial Sequence
  Description of Artificial Sequence: Synthetic polynucleotide
atgatccaggacttcaagggcaaaacggcagtcttgaccggcgcggggagcggattcggcctcgaatgtgcccgcattggtgccgcccgcgggatgaatctcgtgctggtcgacgtacaacaagacgcgttggataaagccgccgctgagatggaggccgctggggtccaggtcctcgcccgtaaagtcgacgtttccgacgcggcccagatggaagccttggccgccgccgtgaaagaacgcttcggtgccccgcattttgtcttcaacaatgcgggcgtaggtgccggcggtctcgtctgggagaacaccgtggctgattgggagtgggtgttgggcgtggacctctggggcgtgatccacggcgttcgcctgttcaccccgatgatgctggaagccgccgccaaagatccagggtaccgtggccacatcaccaacaccgcgagcatggccggactgctgacgccgccgaacatgggcatctataacgccgccaaggccgcggtggtatcgttgaccgagaccctctaccaggatctgaccctggtcacggatcagatcggcgcgtcgttgctgtgtccgtacttcgtgcctaccggcatcacgtcgagcgaacgcaaccgcccgaacgcacccaaggacagcgaactcaccaagtcgcagctgatcggtcaagccatgagtaacaaggcggtcagcagcggcaagatcaccgccgccgaagttgccgccaaggtgttcgacgccatctcggacaatcagttctacgtgttctcccacccgaaagccctgggtaacgtccgtgcgcgtatggaaaacatcgtttcggtagtaaacccggccgacccgttcctggagcgtccagagatcgggcagaaactgcgggagcaactccgggcggcc

SEQ ID NO: 975 - protein, 301 aa, Artificial Sequence
  Description of Artificial Sequence: Synthetic polypeptide
MKQFKGRVAVITGAASGFGREFAQQGAGLGLKLVLADVQQDALDRVAAELGAQGAEVLAVCCDVSKAEQVQALADAAMQRFGAVHLLFNNAGVGSGGLVWENTASDWDWVLGVNLFGVIHGVRIFTPLMLACAKDDPGYEGHIVNTASVAGLQNAPTMGIYNVSKHAVVSLTETLYQDLQLIEAPIGTSLLCPYFVPTGIHQSERNRPAEMQNDAAPTTSQKAAQAFSEKAVVSGKISAAQVAQLTFDAIREDRFYIYSDLEPLASVRQRMEDLVQQRNPHDPYAAVPHIKQLLRAKLQRQ

SEQ ID NO: 976 - DNA, 903 bp, Artificial Sequence
  Description of Artificial Sequence: Synthetic polynucleotide
atgaaacaatttaaaggacgcgtggccgtgatcaccggcgccgcttcgggctttgggcgcgagtttgcgcagcagggcgccggcttgggattgaagctggtcttggcggacgtccagcaagacgccctggatcgtgtcgctgctgagttgggcgcacagggcgccgaggtactggcggtctgttgcgatgtcagtaaggccgagcaggttcaggccctggccgacgccgccatgcagcggttcggcgccgtgcatctgctgttcaataatgccggcgtcgggagtggaggactggtctgggaaaacacggcgtcggactgggactgggtcctgggcgtcaacctgttcggagttatccatggcgtgcgcatcttcacgcccctgatgctcgcatgcgccaaagatgacccaggctatgagggccatatcgtgaataccgcctccgtcgccggcctgcagaatgccccgactatgggcatctacaatgtgtccaagcacgcggtggtgagcctcacggagactctgtaccaggacctccagctcattgaggcccccatcggcacctccctgctgtgcccgtacttcgtaccgaccggcatccaccagtcggaacgcaaccgccccgccgagatgcagaacgacgccgcgcccaccacgagccaaaaagccgcacaggcgttcagtgagaaggcggtcgtgtcggggaagatctcggctgcccaggtggcccagctgaccttcgacgcgatccgggaggaccgcttctatatctactcggacctggagccgctggcttcggtgcgccagcgcatggaagacctggtgcaacagcgtaaccctcacgacccctatgcggcggtgccccatattaagcagctgctgcgtgcgaaactccagcgccag

SEQ ID NO: 977 - DNA, 858 bp, Artificial Sequence
  Description of Artificial Sequence: Synthetic polynucleotide
catatggcgagaaataacacaataacgctgtacgacctccaactggaaagtggctgtacaatttcaccttatgtatggcgcacgaaatacgcgctcaaacacaaaggcttcgatatagacattgtccccggcggctttacgggtattctggaaagaaccggcggacgttcagaacgggtgccagtaatagttgatgatggggaatgggtactggattcatgggtgatcgctgaatacctcgacgagaaatatccagatcgtcctatgctcttcgaaggcccaacccagaagaatttgatgaagtttcttgacaactggctctggtcaacggcagtggggccttggtttcgttgctacattttggattaccacgacttatccctccctcaggacagagattatgtccgctggtctcgtgaacagtggtttttgggcggtcagcgcttggaggatgttcaggctggaagagaagatcgtcttccacttgtgccacctacgctggaaccattccgtcgtattcttgccgagactaaatggttgggcggagatcagcccaactttgccgattattcagccttagcggtatttctttggaccgcatctgtagcgcgtacgccgccccttacggaggatgatccacttcgcgattggctggatcgcggcttcgatttatttgacggcttaggaagacaccccggtatgaaccctttgtttggtctgaaattacgcgagggtgatccagagcccttcgtacgccaaacagggcctgcaggagctggcggtcaggcacttaataagggtccgcagacaactaagatgccgcctcgtgtagcggagaaagctgattgataactcgag

SEQ ID NO: 978 - DNA, 852 bp, Artificial Sequence
  Description of Artificial Sequence: Synthetic polynucleotide
catatggcagctaacaacacgatcaccttctatgacttagctttatccacgggtgcgacaatcagcccgtttgtctgggccacaaaatacgcgctcaaacacaaagggtttgacctggatgtagtccccggcggtttcacaggcatacttgaacgcactggtgggaaaactgaaagactgccagcgatcgttgatgatggggagttcgttctggacagttggggtatcgtcgaatatctggatgccaagtatcctgatcggccagtcctcatccctcatgagagtgtagctgccactcttaaagccttagataattggttctggaacgctgcagtgggaccgtggatgttttgcttttgccaggattatcgggatctgagcttacctcaagatcacgagtacgtaacccatagtcgggagaagatgttggggcgcaaactcgaagaagtccaggcaggtcgtgaagagcggttgccaaagatttcagccgcattggaaccgttgagagccgccttagcccagcaccagtggttaggtggatctagcccgaactatgcggattatcggatcatgggaggcatactttttaccgcctcggtatgcaaaacgcccgtgctggctaacgatgaccctttgcgcgattggattgaacggtgcttggacttatacggtggcttaggccgtcatcccggcctttttccgctcttcggcttggagcagcgggagggcgatccagatttgttcaaccgcgccgctgggcaaggcggtatctacaagcggaacacaggtcctgaaagtacccgggcggaaacacagcgcattacagaaggtatgaagaagtgataactcgag

SEQ ID NO: 979 - DNA, 786 bp, Artificial Sequence
  Description of Artificial Sequence: Synthetic polynucleotide
catatgactctgaaattatacagctttggaccaggagcaaattccctgaagccgcttgccacgttatatgagaagggacttgaatttgaacaggtttttgttgacccgtcaaagtttgaacagcattcggattggttcaaaaagataaaccctcggggccaagtgcctgcattgtggcacgatgggaaagtggtaacggagtctacggtaatctgcgagtacttagaggacgttttcccagagtcaggcaactctcttcggcccgccgacccatttaaacgtgcagagatgagagtctggacgaaatgggtggatgagtacttctgctggtgcgtttccaccattggctgggcctttgggattaaagcgattgctcagaaaatgagcgacgaggaatttgaggagcatattaataagaacgttcccatacctgagcagcaactgaagtggcgccgcgcaagaaatggtttcccacaagaaatgcttgatgaggagtttcgcaaggtaggcgtctccgtcgcacgtttagaggaaactctgtcaaaacaagattatctggtcgatactggctactctttggcggacatctgtaatttcgcgatcgcaaatggtcttcaacgccctggaggcttcttcggggattatgtgaaccaagaaaagacgccaggcttatgcgcttggttagatcgtataaatgctcgcccagccattaaagagatgttcgagaaaagtaaacgcgaagatctccttaaacgtcagaatgaaaaggtcgcctgataactcgag

SEQ ID NO: 980 - DNA, 786 bp, Artificial Sequence
  Description of Artificial Sequence: Synthetic polynucleotide
catatggtcattccgcttggggaagataataccatcatgttgaaattatacagctttggtccagcggccaactcgatgaagccgctgctgactgtatttgaaaagggattagacgtggagaaacaccgccttgaccctgccaaatttgaacatcatacagactggtttaaagctattaacccgagaggtcaagtgcctgcactggtcgatggcgataaagtcgtaactgagagtactgtcatttgcgaatacttagaagatgaataccccacagaagttgcactgcgccccgccgatagcttcggtaaagcgcaaatgcgtatatggactaaatgggtggacgaatacttctgctggtgcgtctcaactataggctggcatcggtatgtcggtaatatggtcaaaagcctgtccgatgctgagttcgaggagaaagtaaaggcaataccggtcatcgagcaacaagtaaaatggagacgtgcacgtgaagggtttccgcaagatatgctcgatgaggagatgcgcaaaattgcttattccgtgagaaaactggacgaccacctggcagatcatgaatggctcgtgcctggacagtatactcttgcggacatttgtaactttgcaatcgccaacggaatgcagtttgggttcgccgaattagttaacaagcaagatacgcctcacctggttcggtggatcgagcaaattaatgaacgccccgctgtgaaacaaatgtttgctcaagtggaactggaaaaacttgggccgcgcgaatgataactcgag

SEQ ID NO: 981 - DNA, 789 bp, Artificial Sequence
  Description of Artificial Sequence: Synthetic polynucleotide
catatggctttaaaatactaccatgcagagccattagcaaattccctcaagagcatggtgccgctcaaggagaaaggactggcttacgagagtatatacgtggacctgcacaagtttgaacagcatcaaccttggtttacggcaataaacccagagggtcaggtaccggttttagaccacgatggcactataattacgcacaccactgttatcaacgagtaccttgaagatgccttccccgatgctcagccagcagatgctcctttacgcccacgcgaccccgtaggcgcggcgagaatgcgttactggaataaattcatcgatgagcatgttatgaactacgttagcatgcacgggtggcatcgtatggtgggagtaatagcccggaacattgccagtggagacttcgaaaagctgttggaaagtatccctctgcccgaccagcgtaaaaagtgggccactgcccggtctggattttcagaagcggatttggccaacgctactgcgaaaattgagtacgcgttagacaaggtggaaaagcagttgggagaaactaagtggctggccggagacacttacaccttagccgacataaacttctattcgcattgcggggctatggtcgaacgcatgttcccagaaatggaggtcgcccgtcgcgctcctagattatgcgaatggcgcgacagagtggcagcgcgtcccgcagtggctgaagccctgaaaagtgaagatcgcaccgcgccggggttgcgtgtttggtctggagaggttcgctgataactcgag

SEQ ID NO: 982 - DNA, 783 bp, Artificial Sequence
  Description of Artificial Sequence: Synthetic polynucleotide
catatggacgaagtgtctctgtaccattgggagccgaatgctaattcggggaaacctatgctcgccttaatggaaaagggtgtcccattctcctcccattacatagacatgctccaatttgatcagcacaaacctgagtatttagcgataaatccccaaggtacaatacctgcaatgactcacaacggtcaagtcctgactgaaagtacagccattatggagtatgtgaatgaccgctttgatggcccagacttaatgcctgcggatgcacaagatagatggcgggtgcgttggtggatgaaattcatggatcaatggttagggccaagtttttcaatgatcggttggtctgttttcgtgggtccaatggtacgtcaaagagatccagccgaattagctgcagcgattgaccgtatcccactcccagagagacggactgcttggcgtaaggcgataaacggtgacttctcagagtcggagatggcagaatctagacgtcgggtgggcctgggcattgcaaagctcgaagaagagttaggtaaacgtccgtatgtggggtcaaaccaatactcactggcagatatcaacatttttaactcaacctattcccttccaatcagtcagcccgatctggctggtaaggaccggactccgaatataatgagatggctgaagcgcgtgtacacaagagaagccgttaagaagacctgggcaatggggaaaactgatctcgctcaccgctacggattaattatggcggagatcgaaggctgataactcgag

SEQ ID NO: 983 - protein, 203 aa, Artificial Sequence
  Description of Artificial Sequence: Synthetic polypeptide
MKLYYTPGSCSLSPHIVLRETGLDFSIERIDLRTKKTESGKDFLAINPKGQVPVLQLDNGDILTEGVAIVQYLADLKPDRNLIAPPKALERYHQIEWLNFLASEVHKGYSPLFSSDTPESYLPVVKNKLKSKFVYINDVLSKQKCVCGDHFTVADAYLFTLSQWAPHVALDLTDLSHLQDYLTRIAQRPNVHSALVTEGLIKE

SEQ ID NO: 984 - DNA, 609 bp, Artificial Sequence
  Description of Artificial Sequence: Synthetic polynucleotide
atgaagctgtactacacccccggcagctgttcgctgagtccgcatatcgttctccgcgaaactggcctggacttttcgatcgaacgcatcgacctgcggaccaagaaaacggaaagcgggaaagacttcctggccatcaacccgaaaggccaggtgccggtgctgcaactcgacaacggggacatcctgaccgagggcgtcgcaattgtccagtacctggcggacctcaagccggatcggaatctcatcgccccgcccaaggccctggaacgctatcatcagatcgagtggctgaacttcctcgcgagcgaggtgcacaagggctatagcccactctttagctccgacaccccggagtcctatctcccagtggtgaagaacaagctcaagagcaagttcgtctacattaacgacgtgctgagcaagcagaagtgcgtctgcggagaccatttcactgtcgctgacgcgtatttgttcaccctcagccagtgggcaccccatgttgcactggacctcaccgacctgagccacctgcaggattacctgacccggatcgctcagcgtccgaacgttcactcggcactcgtaacggaaggcctgatcaaggag

SEQ ID NO: 985 - protein, 227 aa, Artificial Sequence
  Description of Artificial Sequence: Synthetic polypeptide
MGFAKTIDRAKGRNMQNITLYTHPFSRGRYVVWMLKECGAEYTVVPVQFGTQMKSAEYLAINPQGQVPALKFGDAVLTESTAIITFLAEQFPDKHLIPAAGTLERGEYYRWMCILMHLEYAAFNKLHNLPVDTPECRRQIGYGDFDTAWNTLREHLKNRDYIVGNSFTAMDLYCSALILHLTQNWKVLPADETDVLQRYAAKHLARPAFAETTAWMLETAAQMPPVA

SEQ ID NO: 986 - DNA, 681 bp, Artificial Sequence
  Description of Artificial Sequence: Synthetic polynucleotide
atgggcttcgctaagacgatcgatcgggcgaaggggcggaatatgcaaaacatcacgctgtacacccacccctttagtcggggccgttacgtcgtctggatgttgaaggagtgcggcgctgagtacactgtagtgccagtccaattcggcacccagatgaagtccgcagaatacttggccattaacccgcagggacaggtgccggccttgaagttcggcgatgctgtcttgaccgagtcgacggcgatcatcacgttcctggctgaacagttccccgataagcacctgatcccggcagccggcaccctggaacgcggggagtactaccgctggatgtgtatcctgatgcatctggaatacgcggcgttcaacaagctccacaacctcccggtcgacaccccagaatgccgccggcaaattggatatggtgacttcgacacggcctggaacaccctccgcgagcacctgaagaaccgcgactatatcgtgggcaactccttcaccgcgatggatctgtattgcagcgccctcatcctccatctgacccagaactggaaggttctgcccgctgatgaaaccgacgttctgcagcgttatgccgcgaaacatctggcccgcccggcattcgccgagacgaccgcgtggatgctcgaaacggccgcccaaatgccaccagtcgcg

SEQ ID NO: 987 - protein, 222 aa, Artificial Sequence
  Description of Artificial Sequence: Synthetic polypeptide
MRRLYHHGLSPAARKVRVALAEKRLDYEAVIEETWIRNESFLAMNPEGEVPVLVEADGLTITDGWAICEYLEEVYPEPSLLGGPAAMRAEVRRLVAWFDRKFNREVTEPLVREKLLKRVISGGAPDSRQIRAGRANVHTHLRYISWLIDRRRWLAGDMLTYADITAACHLSLIDYAGDVPWEDHPQAKEWYALVKSRPSFRPLLTETISPIRPPRHYADLDF

SEQ ID NO: 988 - DNA, 666 bp, Artificial Sequence
  Description of Artificial Sequence: Synthetic polynucleotide
atgcgccgtctgtatcatcacggcctgagcccagccgcccgcaaggtgcgtgtggcgctggcagaaaaacgcctcgactacgaagcggtgatcgaggagacctggattcgcaacgaatccttcctcgccatgaacccggagggcgaagtgccggtgctggtggaagccgatgggctgacgatcaccgatggctgggccatctgcgagtacctggaagaggtatacccggagccgagtctgctgggcggccccgccgcgatgcgtgctgaagttcggcggctggtggcgtggttcgaccgcaaattcaaccgggaagtcaccgagccactggtccgggagaagctgctcaagcgggtgatctccggcggcgcgcccgactcccgccaaattcgtgccggtcgcgcgaatgttcacacccacttgcgttacatttcgtggctgatcgaccgccggcgctggctcgccggtgacatgctgacttacgccgatatcaccgccgcctgccatctgtcgctgatcgactacgctggcgatgtcccctgggaagaccatccgcaagctaaggagtggtacgcgctggtcaaatcgcggccgagtttccgccccctgctgaccgaaacgatcagcccgatccgccctcctcgtcactacgccgacctggacttc

SEQ ID NO: 989 - protein, 213 aa, Artificial Sequence
  Description of Artificial Sequence: Synthetic polypeptide
MQNITLYTHPFSRGRYVVWMLKECGAEYTVVPVQFGTQMKSAEYLAINPQGQVPALKFGDAVLTESTAIITFLAEQFPDKHLIPAAGTVERGEYYRWMCILMHLEYAAFNKLHNLPVDTPECRRQIGYGDFDTAWNTLREHLKNRDYIVGNSFTAMDLYCSALILHLTQNWKVLPADETDVLQRYAAKHLARPAFAETTAWMLETAAQMPPVA

SEQ ID NO: 990 - DNA, 639 bp, Artificial Sequence
  Description of Artificial Sequence: Synthetic polynucleotide
atgcagaacatcacgctctacacccaccccttcagccggggccgctacgtagtctggatgctgaaggagtgcggcgccgaatataccgtcgttccggtgcagttcggaacgcagatgaagtccgccgagtacctggccatcaacccgcagggacaggttccggccctgaagttcggggatgcggtgctgaccgaatccaccgcgatcatcactttcctggccgagcagtttccggacaagcatctcattccagcggcagggaccgtcgagcggggcgagtactaccgctggatgtgtatcctgatgcacctcgaatacgcggccttcaacaaactgcacaatctgcccgtcgacacccctgaatgccgtcgccagatcggatacggcgatttcgacaccgcctggaacaccctccgtgaacatctgaagaatcgcgattacatcgtcggcaactccttcaccgccatggacctgtattgtagtgccctgatcctgcacttgacccagaattggaaggtcctgcccgccgacgaaaccgacgtgctgcaacgttacgccgccaagcatttggctcgtccggcctttgccgagactaccgcatggatgctcgaaaccgccgcccagatgccgccggtggcg

SEQ ID NO: 991 - protein, 213 aa, Artificial Sequence
  Description of Artificial Sequence: Synthetic polypeptide
MQNITLYTHPFSRGRYVVWMLKECGAEYTVVPIQFGTQMKSAEYLAINPQGQVPALKFGDAVLTESTAIITFLAEQFPNKHLIPAAGTVERGEYYRWMCILMHLEYAGFNKLHNLPVETPECRRQIGYGDFDTAWNTLREHLKNRDYIVGNSFTAMDLYCSALILHLTQNWKVLPADETDVLQRYATKHLARPAFAETQTWTQETAAQMPPVA

SEQ ID NO: 992 - DNA, 639 bp, Artificial Sequence
  Description of Artificial Sequence: Synthetic polynucleotide
atgcagaacatcacgctgtacacgcaccccttttcgcgcggacggtatgtggtctggatgttgaaggagtgcggcgccgaatataccgtcgtccctatccagttcggcacccagatgaaaagcgctgagtacctggccatcaatccgcagggccaggtaccggccctcaagttcggtgacgcggtactcaccgaatcgaccgctatcatcaccttcctggctgagcagttccccaacaagcacctcattccagcggctggcaccgtggaacgcggtgagtactaccggtggatgtgtattctcatgcatctggagtatgccggtttcaacaagctccacaacctccccgtagagaccccagaatgccgccggcagattggttatggcgacttcgacaccgcctggaacactctccgcgagcacctcaaaaatcgcgactacatcgtgggcaacagcttcaccgcaatggatctgtactgcagcgccctgatcctccacctgacccagaactggaaggtactgcccgccgacgaaactgacgtgttgcagcgctacgccaccaaacatttggcgcgcccagcgtttgcggagacccagacctggacccaggaaactgcggcccagatgcccccggtcgcc

SEQ ID NO: 993 - protein, 198 aa, Artificial Sequence
  Description of Artificial Sequence: Synthetic polypeptide
MEAHLRAEPIWDRREEFLAINPAGEVPVLVEDDGTTIAGATPIAEYLEEICPDPALLHGDAAERAETRRLMAWFDRKFDREVTDLLVGEKVLKRFLGIGEPSSEAIRAGHSNIAIHLDYIGWLAERRKWLAGDRFSLADVAAATHLSCVDYLGDVPWDRNAEAKGWYARVKSRPSFRPLLADHVSGLRPAKHYADLDF

SEQ ID NO: 994 - DNA, 594 bp, Artificial Sequence
  Description of Artificial Sequence: Synthetic polynucleotide
atggaagcgcatctgcgggcagagcccatctgggaccggcgggaagagttcctggccatcaatccggccggcgaggtacctgtgctcgttgaagacgacggcaccactatcgccggcgccactcctatcgcggaatacctggaggagatctgtcctgaccccgccctcctccatggggacgccgcggaacgtgccgaaacgcgccgcttgatggcttggttcgatcgcaaattcgaccgcgaggtcactgacctgctggtcggcgagaaggtgctcaaacgtttcctgggtatcggcgagcccagtagcgaagcgatccgtgcagggcactcgaatatcgcgatccatctggactacatcggctggctggctgaacgccgcaagtggttggcgggcgatcgcttcagtctggccgatgtcgccgccgcgacccatctgagctgtgtggactatctgggcgatgtgccctgggaccgtaatgcggaggctaaaggttggtatgcccgggtgaaatcgcgcccctccttccgtccgctgttggccgaccatgtaagcggattgcgtcctgccaaacactacgcagatctcgacttt

SEQ ID NO: 995 - protein, 187 aa, Artificial Sequence
  Description of Artificial Sequence: Synthetic polypeptide
MANFLSILGVEFSERLVDLAEGEHKSAEYLAINPLGQVPVLSHDSVTLRDSTAILIYLARTFDKTNTWWPEDALTQAKIQQWLSVAVHEVMNGPFVLRAIQLFGMPADEAQAREKTEKLFGELFEPHLKETKWLVGETPSIADIACYSYIARVNEGNFSLDAYPAIQQWLRNIEAIEGFKPMMHAGN

SEQ ID NO: 996 - DNA, 561 bp, Artificial Sequence
  Description of Artificial Sequence: Synthetic polynucleotide
atggcgaacttcttgtcgatcctcggcgtagagtttagcgagcgcctcgtggacctggctgagggggaacacaagagtgccgagtacctggccatcaatccgctgggccaggttccggtcctgagtcatgattcggtaacgctccgggatagcacggccattctgatttatttggcccgcaccttcgacaagaccaatacctggtggcccgaggatgctttgactcaggcgaagattcaacagtggctgtccgtcgccgtacatgaggtcatgaacggcccatttgttctccgtgcgatccagctcttcggcatgccagccgatgaagcccaagctcgggagaagactgagaaactgttcggcgaactcttcgagccgcatctgaaggagacgaagtggctggtcggtgaaacgcctagcattgcggacatcgcctgttacagctacatcgcccgggttaacgaggggaacttcagcctggacgcttatccagccatccagcaatggctgcggaacatcgaggccatcgaggggtttaagccgatgatgcatgcgggtaac

SEQ ID NO: 997 - protein, 203 aa, Artificial Sequence
  Description of Artificial Sequence: Synthetic polypeptide
MKLYYTPGSCSLSPHIVLRETGLDFSIERIDLRAKKTESGKDFLTINPKGQVPVLQLDNGDILTEGVAIVQYLADLKPDRNLIASPKSLERYHQIEWLNFLASEVHKGYGPLFSPDTPESYVPIVKTKLKSKFAYINDVLSKQKCACGEHFTVIDAYLFTLSQWAPHVGLDLTDLTHLQNYLKRIAQRPNVHSALVTEGLIKE

SEQ ID NO: 998 - DNA, 609 bp, Artificial Sequence
  Description of Artificial Sequence: Synthetic polynucleotide
atgaagctgtactacaccccgggctcgtgtagcctgtccccgcatatcgtgctgcgcgagaccggtttggacttcagcatcgagcggatcgatctccgcgcaaagaagacggaatccggcaaggatttcctgaccatcaaccctaagggtcaggtccccgttctccaactggacaatggagacatcctgaccgagggcgtcgcaattgttcagtatctggccgacctgaagccagatcgcaacctgatcgccagtcccaagtccctggagcgctaccatcagatcgaatggctcaactttctggcgagcgaagtgcataagggatacggccctctcttctccccggacaccccggaatcctacgtgccgatcgtgaagaccaagctcaagagcaagttcgcgtacatcaacgatgtgctcagcaagcagaagtgtgcctgcggcgagcacttcaccgtaatcgacgcgtatctgtttaccctctcgcaatgggccccgcacgtgggtttggacctgaccgacctgacccacctccagaactacctgaaacgcatcgcgcaacgcccgaacgtccatagcgccctcgtgaccgagggcttgatcaaggag

SEQ ID NO: 999 - protein, 101 aa, Artificial Sequence
  Description of Artificial Sequence: Synthetic polypeptide
LTFYYFPRSPCARRVWLTLIEKALPYHGVMVNLMAGEQRSDEYLAINPQGKVPVLVVRGHATLPDCTIYESQAICTFLDEAFPESKPLYPSDLAARTDVEQ

SEQ ID NO: 1000 - DNA, 303 bp, Artificial Sequence
  Description of Artificial Sequence: Synthetic polynucleotide
ctgaccttctactacttcccacggagcccctgtgctcgccgcgtctggctcaccctgatcgagaaagccttgccgtatcatggcgtgatggtgaacctgatggcgggtgagcaacgttccgatgagtacctcgctatcaatccccaaggtaaggtgcctgtcctggtagttcgcgggcatgccaccctgccagactgcaccatctacgagtcgcaggcgatctgcaccttcttggacgaagcgtttcccgaatcgaagccgttgtacccctcggatctggccgctcgcaccgacgtcgagcaa

SEQ ID NO: 1001 - protein, 286 aa, Artificial Sequence
  Description of Artificial Sequence: Synthetic polypeptide
MGPPPDADIHPTATGRAKEVVDKHSKEQPLKLYSGWFCPNSNTRVIAQRVWIVLEEKNIPYQYIEVNPYKKPDSLLALNPRGLVPTIACPTIQPDGSTAIKPLYESTVINEYLEDAFPNPEQPLHPADPYQKARGRIWIDYVTSRITPSFYRFLQYQGEEEGLNKAREEFLGHLKESILAMDEIGPFFHGSNFMMPDIMLAPLAIRFWVTDHFKKGGLGIPAPGKGGNDEVVWNRWRMWLAAVETRESVASTMSDKEHSMPIYKRYADDVAQSELAKATRAGKGVP

SEQ ID NO: 1002 - DNA, 858 bp, Artificial Sequence
  Description of Artificial Sequence: Synthetic polynucleotide
atggggcctccgccggacgcggacatccacccgaccgccactggccgggccaaggaggtcgtggacaagcatagcaaagaacagccgttgaagctctactcgggctggttctgccccaatagcaacacccgtgtgatcgcgcagcgcgtctggatcgtcctggaggagaagaacatcccgtatcagtacatcgaagtcaacccgtacaaaaagccggattccctgctggcgctgaacccccggggcctggtaccgacgattgcctgtccgaccattcagccggacggcagcactgcaattaagccgctctatgagagtacggtgatcaacgagtacctggaagacgccttcccgaatccggaacagcccctgcacccggctgatccgtaccagaaggcgcgtggccgcatctggattgactacgtcaccagccgcatcaccccatccttctaccgctttctgcagtaccagggcgaggaggaaggcctgaacaaagctcgcgaggagttcttgggtcacctcaaggaatcgatcctcgcgatggacgaaatcggccccttcttccacggcagcaatttcatgatgccggacatcatgctggcgccgctcgctatccgcttctgggtcactgatcacttcaagaagggagggctgggcatcccggcgcccggtaaaggcggaaacgatgaggtcgtatggaatcgctggcgcatgtggctggctgcggtcgagactcgcgaaagcgtcgccagtaccatgtcggataaggaacacagcatgccgatctacaagcgctatgccgacgacgtggcacagagcgaactggccaaggctacgcgcgcggggaagggcgtacct

SEQ ID NO: 1003 - protein, 282 aa, Artificial Sequence
  Description of Artificial Sequence: Synthetic polypeptide
MGPPPDADIHPTATGRAKEVVDKHSKEQPLKLYSGWFCPYVSIQRVWIVLEEKKIPYQYIEVNPYKKPDSLLALNPRGLVPTLACPTIQPDGSTAIKPLYESTVINEYLEDAFPNPERPLHPADPYQKARGRIWIDHVTSRITPSFYRFLQYQGEEEGLNKAREEFLGHLKDFILEMDEIGPFFHGSNFMMPDIMLAPLAIRFWVIDHFKKGGLGIPAPGKGGNDEVVWNRWRMWLAAVETRESVASTMSDKEHSMPIYKRYADDVAQSELAKATRAGKGVP

SEQ ID NO: 1004 - DNA, 846 bp, Artificial Sequence
  Description of Artificial Sequence: Synthetic polynucleotide
atggggccgccgccggatgcggatatccaccccactgcgaccgggcgcgccaaagaagtcgtcgacaagcactccaaggaacaacccctcaagctgtactccggttggttctgcccgtacgtgagcatccaacgggtctggatcgtgctggaggaaaagaagatcccgtaccagtatatcgaggtgaacccgtacaagaaaccagactcgttgctggccctcaacccacgtggcctcgtgccgaccctggcgtgtcccactatccagccggacggaagtaccgctatcaagccgctgtacgagagtaccgtgatcaacgagtacctcgaagacgcattcccgaacccggagcgcccgctccatccggccgacccgtaccaaaaagcacgtggtcgcatctggatcgaccacgtcacgtcgcggatcaccccgtccttctaccgcttcctgcagtatcagggcgaggaggagggactgaacaaggcgcgcgaggagttcctgggccatttgaaggactttatcctggagatggacgagatcggcccgttcttccatggctcgaacttcatgatgcctgatatcatgctcgcgccgctggccatccgcttctgggtgattgaccatttcaagaagggcggactcggcatcccggctccggggaagggcggcaacgacgaagtggtgtggaaccgctggcgtatgtggctggcggcggtagagacccgcgaaagcgtcgcgtcgacgatgagcgacaaggagcatagcatgccgatttacaagcgctacgcggatgacgtggctcagtcggaactcgcgaaagccactcgggccggtaaaggcgtcccg

SEQ ID NO: 1005 - protein, 251 aa, Artificial Sequence
  Description of Artificial Sequence: Synthetic polypeptide
MDIKGCHLLITIQRVWIVLEEKKIPYQYIEVNPYKKPDSLLALNPRGLVPTLACPTIRPDGSTAVKPLYESTVINEYLEDAFPNPEQPLHPADPYQKARGRIWIDYVTSRITPSFYRFLQYQGEEEGLNKAREEFLGHLKEFILAMDEIGPFFHGSNFMMPDIMLAPLAIRFWIIDQFKKGGLGIPAPGEGGNDEVVWNRWRMWLAAVETRESVASTMSDKEHSMPIYKRYADDVAQSELAKATRVGKGVP

SEQ ID NO: 1006 - DNA, 753 bp, Artificial Sequence
  Description of Artificial Sequence: Synthetic polynucleotide
atggacatcaaggggtgtcacctgctgatcaccatccagcgcgtttggattgtgctggaggagaagaagatcccgtaccagtatatcgaagtgaacccatataagaagccggacagcctcctcgccctgaacccgcgcggtttggttcccaccctcgcgtgccccaccatccgccccgacggtagtaccgcagtcaagccactgtatgagagcacggtcatcaacgagtacctggaggatgccttcccgaaccccgaacaacccttgcaccccgccgatccgtatcaaaaagcccggggccgtatctggatcgattatgtgacctcccggatcacgccgagtttctaccgctttctgcagtatcagggagaagaggagggcctgaacaaggcccgggaagagttcctgggccacctgaaggagttcatcctcgcgatggacgagatcgggccgttcttccacggcagcaactttatgatgccggacatcatgctcgccccgctggcgatccgcttctggatcatcgaccaattcaagaagggtgggctgggtattccggcccccggcgaagggggcaatgatgaggtagtttggaatcgctggcgcatgtggctcgcggcggtcgaaacgcgcgaaagtgtggcgagcaccatgagtgacaaggagcatagcatgcctatctacaaacgctacgccgatgatgtcgcccaatccgagctggccaaggcgacgcgggtaggcaagggcgtcccc

SEQ ID NO: 1007 - protein, 250 aa, Artificial Sequence; identical to SEQ ID NO: 537
  Description of Artificial Sequence: Synthetic polypeptide

SEQ ID NO: 1008 - DNA, 750 bp, Artificial Sequence
  Description of Artificial Sequence: Synthetic polynucleotide
atgctgaccctgtattccttcggccctggcgctaactcgctgaagcccctcctggcgctgtacgaaaagggcctggagttcaccccacgcttcgtagacccgacccggttcgaacaccacgaggagtggttcaagaagatcaatccgcgcggtcaggtccctgctctggaccacgacgggcatattatcaccgagagcaccgtaatctgtgagtatctggaggacgcctttcccgaggcaccccggctccggccggtggaccccgtcatgatcgcggaaatgcgcgtctggaccaagtgggtggatgagtacttctgctggtgtgtctcgacgatcggctgggagcgcatgattggcccaatggcccgcgccctgtccgacgaggagttcgaggccaaggtggctcgcatccctgtgcccgaacagcgcaccaaatggcggactgcgcgcaccgggttcccgaaggaggtgctcgacgaggagatgcgcaaaatcggagtctcggtcaaccgcctggagacccgcttggccgagagcccttggttggcgggggagaacttcagtctcgcggatgtctgcaatttcgccatcgcgaacggcatgcaaaacggcttctccgacatcgtcaaccgggaggcgaccccgcatctggtcgcctggatcgagaagatcaacgaccgcccggcgtgtaaggccatgttcgcgaacagtaagtcggagttcgcagaccggggtcagaaggtcacggcg

SEQ ID NO: 1009 - protein, 263 aa, Artificial Sequence
  Description of Artificial Sequence: Synthetic polypeptide
MGSPPDADIHPTATGWAKEVVDKHSKEQPFKLYSGWFCPPAKVNPYKKPESLLELNPRGLVPTLACPTLQPDGSSAVKPLYESTVINEFLEDAFPNPELPLHPADPYQKARGRIWIDYVTSRITPSFYRFLQYQGKEEGLNKAREELLGHLKEFILAMDEIGPFFHGSDFMLPDIMLAPLAIRLWIIDHFKKGGLGIPAPKEGGKDEVVWRRWRIWLAAVETRESVASTMSDKEHSMPIYKRYADDVAQSELAKATRAGKGVP

SEQ ID NO: 1010 - DNA, 789 bp, Artificial Sequence
  Description of Artificial Sequence: Synthetic polynucleotide
atgggcagcccaccggacgccgacattcacccgacggccaccggctgggcgaaggaggtcgtggacaagcatagcaaggagcagccgttcaagctgtacagcgggtggttctgcccgcctgcaaaggtgaacccctataagaagcccgagtcgctgctggagctgaacccgcgcggcctggtaccgactttggcctgtcctaccctgcagccggatggttccagcgctgtgaagccgctgtatgagtcgaccgtcatcaacgagttcctggaggacgcgtttcctaacccggaactcccgctccacccggcggacccttaccaaaaggcgcgcggccggatctggatcgactatgtgacgagccgcatcaccccgtccttctaccggttcttgcagtaccagggcaaggaggaagggctgaacaaggcccgcgaggagctgttgggccatctgaaagagttcatcctcgccatggacgagatcggcccattcttccacggcagcgacttcatgctccctgacattatgctcgcgcccctggctatccgcctgtggatcatcgaccacttcaagaagggcggcctgggcatccctgcaccaaaggaaggcggtaaagacgaagtggtgtggcgccggtggcgcatctggttggccgcggtggaaacccgggagtcggtagcgtcgaccatgagtgataaggaacatagcatgccgatctacaagcgctacgccgacgacgtggcgcagtcggagctcgccaaagccacgcgcgccggcaaaggcgtcccg

SEQ ID NO: 1011 - protein, 240 aa, Artificial Sequence; identical to SEQ ID NO: 749
  Description of Artificial Sequence: Synthetic polypeptide

SEQ ID NO: 1012 - DNA, 720 bp, Artificial Sequence; identical to SEQ ID NO: 750
  Description of Artificial Sequence: Synthetic polynucleotide

SEQ ID NO: 1013 - protein, 221 aa, Artificial Sequence
  Description of Artificial Sequence: Synthetic polypeptide
MSSSETQKMQLYSFSLSSCAWRVRIALHLKGLDFEYKAVDLFKGEHLTPEFLKLNPLGYVPVLVHGDIVIADSLAIIMYLEEKFPENPLLPQDLQKRALNYQAANIVTSNIQPLQNLAVLNYIEEKLGSDEKLSWAKHHIKKGFSALEKLLKGHAGKYATGDEVGLADLFLAPQIIASITGFGMDMAEFPLLKSLNDAYLKYQHFRMRCQRISPMLDEAKS

SEQ ID NO: 1014 - DNA, 663 bp, Artificial Sequence
  Description of Artificial Sequence: Synthetic polynucleotide
atgagcagcagcgagacgcaaaagatgcagctctacagcttcagcctgagctcctgtgcgtggcgcgtgcgtatcgccctgcacctgaagggtctggatttcgagtacaaggcggtcgacctgttcaagggggagcatctgacgccggagttcctgaagctgaacccgctgggctatgtgccggtcctggtccacggggacatcgtcatcgccgactccctggcgatcatcatgtacctggaggaaaagttccccgagaacccgctgctcccccaagatctgcaaaagcgtgccctcaactaccaggcggccaacatcgtgacctcgaacatccagcccctccagaacctggccgtcctcaactacatcgaggaaaagctcgggtcggacgagaagctgtcgtgggcgaagcatcacatcaagaagggcttctccgccctggaaaagctcctgaaaggtcacgccgggaagtacgcgaccggcgacgaagtcggcctcgccgatctcttcctggccccgcagatcatcgcctcgatcaccggtttcggcatggacatggccgagttccccctgctgaagagcctgaacgatgcctacctcaagtatcagcacttccgcatgcgctgccagcgtatcagccccatgctggacgaagcgaagagc

SEQ ID NO: 1015 - protein, 225 aa, Artificial Sequence
  Description of Artificial Sequence: Synthetic polypeptide
MASVEQPNKPKLKLYSYFRSSCSFRVRIALNLKGLDYEYVPVNLLKGEQFTPEFLKINPIGYVPALVDGEDVISDSFAILMYLEEKYPEHPILPADIHKKAINYQAANIVSSSIQPLQNLAVLNFIGEKVSPDEKVPWVQRHISKGFAALEKLLQGHAGRFATGDEVYLADLFLEPQIHAAITRFNVDMTQFPLLLRLHEAYSQLPEFQNAMPDKQPDSTSPTAS

SEQ ID NO: 1016 - DNA, 675 bp, Artificial Sequence
  Description of Artificial Sequence: Synthetic polynucleotide
atggcgtcggtcgaacagccgaacaagcccaagctgaagctgtattcctacttccgctcctcctgtagcttccgcgtccgcatcgcgctgaacctgaaagggctggattacgaatacgtcccggtcaacctcctcaagggcgaacagttcaccccggagttcctgaagatcaaccccatcggctacgtgccggccctcgtggatggtgaggacgtcatctcggacagcttcgccatcctgatgtacctggaagagaagtacccggagcatccgatcctgcccgccgacatccacaagaaggcgatcaactaccaggccgccaacatcgtcagctccagcatccagccgctgcagaatctggcggtgctgaacttcatcggtgagaaggtctccccggacgagaaggtcccgtgggtccagcgtcatatcagcaaggggttcgcggcgctggagaaactcctgcagggccatgcgggtcggttcgcgaccggcgatgaggtctacctggcggacctgttcctggagccgcaaatccacgccgccatcacgcggttcaacgtcgatatgacccagttcccgctgctcctccgcctgcacgaagcctactcgcaactgccggagttccagaacgccatgccggacaagcagccggatagcacctcgccgaccgcgtcc

SEQ ID NO: 1017 - protein, 222 aa, Artificial Sequence
  Description of Artificial Sequence: Synthetic polypeptide
MAPLKLYGMPLSPNVVRVATVLNEKGLDFEIVPVDLTTGAHKQPDFLALNPFGQIPALVDGDEVLFESRAINRYIASKYASEGTDLLPATASAAKLEVWLEVESHHFHPNASPLVFQLLVRPLLGGAPDAAVVEKHAEQLAKVLDVYEAHLARNKYLAGDEFTLADANHALLPALTSARPPRPGCVAARPHVKAWWEAIAARPAFQKTVAAIPLPPPPSSSA

SEQ ID NO: 1018 - DNA, 666 bp, Artificial Sequence
  Description of Artificial Sequence: Synthetic polynucleotide
atggccccgctgaaactgtacggcatgccgctctccccgaacgtcgtgcgggtcgcgaccgtgctgaacgagaagggcctggacttcgaaatcgtgcccgtggacctgaccacgggcgcccacaagcagcccgatttcctggccctcaacccgttcggccagatccccgccctggtcgacggcgacgaagtcctgttcgagtcgcgtgccatcaaccggtacatcgcgtccaagtacgcgagcgaaggcacggacctgctcccggcgaccgcgtcggcggcgaaactggaggtgtggctggaggtggagtcccatcacttccatcccaacgcgagccccctggtcttccaactcctggtgcgtccgctgctgggcggtgccccggacgcggccgtggtcgagaagcatgccgaacagctcgccaaggtgctggacgtgtacgaggcccatctggcccgcaacaagtacctggccggggatgagttcaccctcgccgatgcgaatcacgccctgctgccggcgctcacctccgcgcggcccccgcgccccggctgtgtggccgcccgcccgcatgtgaaggcctggtgggaggccatcgcggcccgccccgcgttccagaagacggtggccgcgatcccgctgccgcccccgccgagctcgtcggcg

SEQ ID NO: 1019 - protein, 212 aa, Artificial Sequence; identical to SEQ ID NO: 669
  Description of Artificial Sequence: Synthetic polypeptide

SEQ ID NO: 1020 - DNA, 636 bp, Artificial Sequence
  Description of Artificial Sequence: Synthetic polynucleotide
atgaagctctacacctactaccggtcgacgagctcgtaccgggtccgcatcgccctcgcgctgaaggggctggactatcagagcctgcccgtcaacctgatccgcgacggtggggaacaccgtcaaccggcctatctcgccctgaacccgcaaggccgtgtccccgcgctgcaggtggacgagggcgagctgctgatccagtccccggccatcatcgagtacctggaggaacgctacccccagccggccctcctgtcgtcggacccgctgcggcgcgcgcgggaacggggcgtcgcggccctggtgggctgtgatatccacccgctccataacgccagcgtcctcaatctgctgcggcagtggggccatgatgaagagcaggtgcgccagtggatcggccactgggtgggccaaggcctggcggccgtcgagcagctcatcggcgaccagggctggtgtttcggcgatcgccccggtctggccgacgtgtatctcgtcccgcaactgtacgcggccgagcgcttcggcgtcgcgctcgacgcgtggccccgcatccgccgggtggcggatctggccgccgcgcatccggcgttccggcaagcccatccggccaatcagccggataccccggcggcc

SEQ ID NO: 1021 - protein, 223 aa, Artificial Sequence
  Description of Artificial Sequence: Synthetic polypeptide
MATPAVKVYGWAISPFVSRALLALEEAGVDYELVPMSRQDGDHRRPEHLARNPFGKVPVLEDGDLTLFESRAIARHVLRKHKPELLGGGRLEQTAMVDVWLEVEAHQLSPPAIAIVVECVFAPFLGRERNQAVVDENVEKLKKVLEVYEARLATCTYLAGDFLSLADLSPFTIMHCLMATEYAALVHALPHVSAWWQGLAARPAANKVAQFMPVGAGAPKEQE

SEQ ID NO: 1022 - DNA, 669 bp, Artificial Sequence
  Description of Artificial Sequence: Synthetic polynucleotide
atggccacgcccgccgtcaaggtctacggctgggcgatctccccgttcgtctcgcgcgcgctgctcgcgctggaggaggcgggggtcgattacgagctggtgccgatgtcccgccaagatggcgaccatcgccgcccggagcatctggcgcgtaaccccttcgggaaggtcccggtgctggaagacggcgatctcaccctcttcgaaagccgggccatcgcgcgccacgtgctccgcaaacataagccggagctgctgggcggtggccggctggagcagaccgccatggtggacgtgtggctggaagtcgaggcgcaccagctgagcccgccggcgatcgccatcgtcgtggagtgtgtgttcgcgcccttcctcggccgggaacggaaccaggccgtggtcgacgaaaacgtcgagaagctgaagaaggtcctggaggtgtacgaggcccgtctggcgacctgtacctatctcgcgggcgacttcctgtcgctggccgatctgtccccgttcaccatcatgcactgtctgatggccaccgaatacgcggcgctggtccatgccctcccgcatgtgagcgcctggtggcagggtctggccgcgcgccccgccgcgaacaaagtggcgcaattcatgccggtgggtgcgggggcccccaaagagcaggag

SEQ ID NO: 1023 - protein, 217 aa, Artificial Sequence
  Description of Artificial Sequence: Synthetic polypeptide
MANLPILLDYWPSMFGMRARVALREKGVEFEYREEDFSNKSPLLLQSNPIHKKIPVLVHNGKPVCESLNVVQYVDEAWPEKNPFFPSDPYGRAQARFWADFVDKKFTDAQFKVWGKKGEEQEAGKKEFIEAVKILESELGDKPYFGGDSFGYVDISLITFSSWFQAYEKFGNFSIESESPKLIAWAKRCMEKESVSKSLPDSEKIVAYAAEYRKNNL

SEQ ID NO: 1024 - DNA, 651 bp, Artificial Sequence
  Description of Artificial Sequence: Synthetic polynucleotide
atggcgaatctgccgatcctgctcgactattggccctcgatgttcgggatgcgggcgcgcgtggcgctgcgcgaaaagggcgtggagttcgagtaccgcgaagaagacttctccaacaagtcgccgctcctgctgcaatccaaccccatccataagaagatccccgtcctggtgcacaacggtaagcccgtctgcgaaagcctgaacgtggtccaatatgtcgacgaagcctggccggaaaagaaccccttcttcccgtccgacccgtatgggcgcgcgcaagcccggttctgggccgacttcgtggacaagaagttcaccgatgcccagttcaaggtgtggggtaagaagggcgaagagcaggaggccggcaagaaggagttcatcgaagccgtcaaaatcctggagtccgagctgggtgacaagccgtacttcgggggcgacagcttcggctacgtggatatcagcctgatcacgttcagcagctggttccaggcctacgagaagttcggcaacttcagcatcgagagcgaaagccccaagctgatcgcgtgggcgaagcggtgtatggaaaaggagtcggtcagcaagtcgctcccggactccgaaaagatcgtcgcgtacgccgccgaataccggaagaacaacctg

SEQ ID NO: 1025 - protein, 218 aa, Artificial Sequence
  Description of Artificial Sequence: Synthetic polypeptide
MVTVKLYGMAYSTCTKRVYTTAKEIGVDVKIVPVDLMKGEHKEPAYLDNYHPFGVIPVLEDEDGTKIYESRAISRYLVAKYGKGSSLLPSPSDPKAYGLFEQAASVEYSSFDPPASSLAYERVFAGMRGLKTNEELAKKYVDTLNAKMDGYERILSKQKYLAGNDFTLADLFHLPYGAMVAQLEPTVLDSKPHVKAWWAASLRVIPGRLLRNSSKEFM

SEQ ID NO: 1026 - DNA, 654 bp, Artificial Sequence
  Description of Artificial Sequence: Synthetic polynucleotide
atggtcaccgtgaagctctacggcatggcgtactccacctgcaccaagcgggtgtataccaccgccaaggagatcggcgtggacgtgaagatcgtcccggtggacctcatgaagggcgagcataaagagccggcgtacctcgacaactatcacccgttcggtgtcatcccggtcctggaagacgaagacggcacgaagatctacgagagccgcgccatcagccgttacctggtcgcgaagtatggtaaggggtccagcctcctgcccagccccagcgatccgaaggcctacggcctgttcgaacaagcggcgagcgtggagtattcctcgttcgacccgccggcgagcagcctcgcctacgaacgtgtcttcgccggcatgcgtggcctgaaaacgaatgaggagctcgcgaagaagtacgtcgacaccctgaacgccaaaatggacggctacgagcgcatcctgagcaagcagaagtatctggcggggaacgacttcaccctggcggatctcttccacctcccctatggcgcgatggtcgcccaactggaaccgacggtgctggactccaagccgcacgtcaaggcctggtgggccgccagcctgcgtgtcatcccgggccgcctgctccggaacagcagcaaggagttcatg

SEQ ID NO: 1027 - protein, 219 aa, Artificial Sequence
  Description of Artificial Sequence: Synthetic polypeptide
MTPVKVFGPAQSTNVARVLLCLEEVGAEYEVVNVDFTVMEHKSPEHLKRNPFGQIPAFQDGDLYLFESRAIGKYILRKYKTREADLLREGNLREAAMVDVWTEVETHQYNSAISPIVYECIINPAMRGIPTNQKVVDESAEKLKKVLEVYEARLSQSTYLAGDFVSFADLNHFPYTFYFMGTPYASLFDSYPHVKAWWERLMARPSVKKLAAVMAPQGA

SEQ ID NO: 1028 - DNA, 657 bp, Artificial Sequence
  Description of Artificial Sequence: Synthetic polynucleotide
atgaccccggtgaaggtcttcggcccggcccagtccacgaatgtcgcgcgcgtcctgctctgtctggaggaggtgggcgccgagtacgaggtggtcaacgtcgacttcaccgtgatggagcacaagtcccccgaacacctcaaacgcaaccccttcgggcagatcccggccttccaagatggggatctgtatctgttcgagagccgcgccatcgggaagtacatcctccgtaagtacaagacgcgcgaggccgacctgctgcgtgaaggcaatctgcgggaagcggccatggtcgatgtctggacggaggtcgaaacgcaccagtacaactcggccatctcgcccatcgtgtacgagtgcatcatcaacccggcgatgcgcggtatcccgaccaaccaaaaggtcgtggacgagtcggcggagaagctcaagaaggtgctcgaagtctacgaggcccggctgtcgcagagcacctatctggcgggggacttcgtgtccttcgccgatctgaaccacttcccctacaccttctatttcatgggcacgccgtatgcgtcgctgttcgactcgtacccgcacgtgaaagcctggtgggagcgcctcatggcccgtccctccgtcaagaaactcgcggccgtgatggcgccgcagggcgcg

SEQ ID NO: 1029 - protein, 215 aa, Artificial Sequence
  Description of Artificial Sequence: Synthetic polypeptide
MAPMKLYGSTLSWNVTRCVAVLEEAGAEYEIVPLDFSKGEHKAPDHLARNPFGQVPALQDGDLFLWESRAICKYVCRKNKPELLKDGDLKESAMVDVWLEVESNQYTPALNPILFQCLIRPMMFGAPPDEKVVEENLEKLKKVLEVYEARLTKCKYLAGDYISVADLSHVAGTVCLGATPHASVLDAYPHVKAWWTDLMARPSSQKVASLMKPPA

SEQ ID NO: 1030 - DNA, 645 bp, Artificial Sequence
  Description of Artificial Sequence: Synthetic polynucleotide
atggcgccgatgaagctgtacgggagcaccctgtcgtggaacgtcacccgctgcgtcgcggtcctggaagaagccggcgcggagtatgaaatcgtcccgctggacttctccaagggggagcacaaggcccccgaccatctggcgcgtaacccgttcggccaggtccccgccctccaggacggcgatctcttcctctgggaaagccgggccatctgcaagtacgtctgccgcaagaacaagccggagctgctcaaggacggggacctgaaggagagcgccatggtggacgtctggctggaggtcgagtccaaccagtatacgccggcgctcaacccgatcctgttccaatgtctcatccgccccatgatgttcggtgccccgccggacgagaaggtggtcgaggagaatctggagaagctgaagaaggtcctggaggtctacgaagcccgcctgaccaagtgcaagtatctggccggcgactacatctcggtggcggacctgtcccatgtggccggcacggtctgtctgggcgcgaccccgcatgcctccgtgctcgacgcctacccccatgtcaaggcgtggtggacggatctcatggcccggccctcgtcccagaaggtggcgagcctgatgaaacccccggcc

SEQ ID NO: 1031 - protein, 215 aa, Artificial Sequence
  Description of Artificial Sequence: Synthetic polypeptide
MKLYGALLSPFVRKIAVVATEKGLSFEMARGGPGSTDPEFIACSPLGKIPAIDDGGFQLADSSAIAVYLDARYPEPRLIPEDPQLRGKAVFWDEFADTVLGASGLKILFNRLVGPKLLKTGGDEAIALQGEAELPRWVDWFESVVPGQGWLLGETFSLADIAVASTFRTLAYVGHGVDAGARPGTASWYDRVTARPAWAAVAEQEEVTARRIMAL

SEQ ID NO: 1032 - DNA, 645 bp, Artificial Sequence
  Description of Artificial Sequence: Synthetic polynucleotide
atgaagctgtatggggcgctcctgtcgcccttcgtgcgcaagatcgcggtggtcgccaccgagaagggcctctccttcgaaatggcgcgcggcggtcccggctcgaccgacccggagttcatcgcgtgctcgccgctgggcaagatcccggccatcgacgacggtggcttccagctggcggactcctccgccatcgccgtctatctggacgcccgctacccggagccccgcctgatccccgaggacccgcagctccggggcaaggccgtgttctgggacgagttcgcggacaccgtcctgggcgcctccggcctgaagatcctcttcaaccggctggtcggcccgaagctgctgaagaccggcggcgacgaagcgatcgccctccagggtgaagccgaactgccgcggtgggtcgattggttcgagtcggtggtccccggccaaggctggctcctgggcgaaaccttcagcctggccgacatcgccgtggcctcgaccttccgcacgctggcctatgtcggccatggcgtcgatgccggtgcccgcccgggcaccgcctcgtggtacgaccgtgtgaccgcgcgcccggcgtgggccgcggtggccgagcaagaggaagtcaccgcccggcgcatcatggccctg

SEQ ID NO: 1033 - protein, 311 aa, Artificial Sequence
  Description of Artificial Sequence: Synthetic polypeptide
MHEPVLHHYPSSPFAEKVRLILGFKQLSWRSVIVPRVMPKPDLLALTGGYRRTPVLQIGADVYCDSALIARRLEAEKVFPTLFPEEQAFNVAGLAAWADEFFFLHAAALAFQPEAVAQRFAQSPPGELKAFVEDRAALFSGGTFERLPLEQARQQWPTLMARLQRQLEHADGDYLFGEPSLADFAVAHPLWLLRAMPLTTALVDAWPAVAAWLDRVLGFGHGSSSGLSAADAIDIARAAIPASLPNEPSIEGGDWHVGQRVAVAATDYGVEPLEGELLHAGFEELILRREDPRAGVLHVHLPRLGFRVVGR

SEQ ID NO: 1034 - DNA, 933 bp, Artificial Sequence
  Description of Artificial Sequence: Synthetic polynucleotide
atgcacgagccggtgctccatcactacccctcgtcccccttcgccgagaaggtccgtctgatcctgggctttaagcagctctcgtggcgctccgtaatcgtcccgcgggtgatgcccaagccagacctgctcgcgctcactggcggctatcgtcgtaccccggtgctgcagattggtgccgacgtgtattgcgattcggcgctgattgcccgccgcctggaagccgagaaagtcttcccgacgttgttcccggaagagcaggcgttcaacgtagcggggttggccgcctgggccgacgagttcttcttcctgcacgccgcggccctggcgttccaacccgaggccgtcgcgcagcgcttcgcccaatcccctccgggcgagctgaaagcgttcgtggaagaccgggccgccctgttctcgggtggtaccttcgaacgcctgccgctggagcaggcgcgccagcagtggccgactctgatggctcgcctgcaacgccaattggagcacgcggacggggactacctgttcggcgaaccgtccctcgccgacttcgcggtggcccaccccctgtggctgctgcgcgccatgcccctcactaccgcactcgttgatgcctggcctgccgtcgcagcgtggctggaccgcgtcctgggcttcggtcacggcagttcctcgggcttgagtgccgcggatgccatcgatattgcccgcgctgcgatcccggcgagcctgccgaacgagccgagcattgaagggggtgactggcatgtcggccaacgcgtggccgtagcggcgaccgactacggcgtggagccgctggaaggagagctgctgcatgccggcttcgaggaactgatcctgcggcgcgaagatccgcgcgcaggtgtcctccatgtgcacctgccccggctgggcttccgcgttgtcggccgc
